United States Patent Application Publication US 2026/0275333 A1 - sequence listing, part 25

SEQ ID NO: 3045 - RNA, 64444167 nt, Homo sapiens (residues 51,555,337-53,703,475 of 64,444,167)
  source 1..64444167: mol_type = mRNA
taatcccagcactttgggaggccgagtcaggtggatcatgaggtcaggagatcgagaccatcctggctaacacagtgaaaccccgtctctactaaaaatacaaaaaattagctgggtgtggtggcgggcgcctgtagtcccagctacttgggaggctgaagcaggaaaatggcgtgaatccgggaggcagagcttacagtaagctgagattgccgccattgcactccagcctgggcgacagagtgagactccatctcaaaaaaaaaaaaagatcctatgtgatcctgtcccacgatcttgtctccatcatgctccccctgccccttctgatccagccccactgggctccttgctgttcactgagcatcccgagcacatgcctctcctcagggcctttgcacacatcgctcattctgcctggaatgctcttcctccagacatctttcaggcggattcctcaccattcaggggtcaaccaaaaaaagatattgccttagagaggaagggctatccagcccgaatgaggaatcctactcttgtagattgaatcgtccctcctgaccctaccaaaaaaatatattcaagtcctaactctagatcctatgaatgggaccttatttggaaatagtgtctttgcagatgtaatcaagttcagatgaagtcatactagacttaaaggggtccaggctaatgacagctgtccccgtgagaagaggaatcaacgcacatgcactcgggaagaaggtcacatgaagacagaggcagagatgggagtgacacagccacaggccacagagggccaagggtctccaggagccactggaagctgggagagacaaagaagggtttcctcctagagccttcagggagagcatggccctgtgacaccttgattcaaacttccggcctctagaactatgagagaataaatatgtattgtttaaagccattcaatttgtggtcatttgttatagcagccactggaaactactacacccacccactcaccagacacacacacaccccaagtcgttcgcaactccattctccttttaaccgtaacaatggcctttagacttcctttggtccctggtccttgacggcatctgaagtcatcctggctatttcctggcaagcctcatgaggccatgctctgtatctgcctcattcaccgctgaatccccagcatcttggaaagtacccggcacgtgatagatccccaaacatcttggtgaaaacacattaaatggtcaagggggcatctaagaggagatggaaactgggctgggccttcaagaaagatgtgaaggaaaggagagaaacccagataggaagcctcactcaagcacaggcaaagagagggaccaacagtgcccgttgaggaggagcgatagcacaggcaaaggccagcatggaagcagcaattttgctggagcccggagccccggagtgtcaggggaaagaaacacccagctgggcttcagccacccagagaagctctgaggaaaggagccccggataggtccattgtgatagagagccagagagaggggatgggggctgctaggagtcattgcgtggtgcagaaagtcaagcaggaagggaagagattcccctgactccagacttcgtggcgggctggctcctttagggggctggggccttcctcttcagctcatcttggctgaatagtcctgctgcaggaagcagtaaagactggaccatggagcccttaaaaaccaagcttttggcatcagctgggcctagggctgccccataaaatgccttgaccactccccgtgttctctaaaaggagggtcctactctataccaagctctcagggttttgtgggtgtgtgtgagaatccaatgtgataatatctgtaaagtggctggccttagggtacacatccagtagggaaaagatgatcgccctattattattattcagcattacagtcagggagcaacaggggtgtgggtttgaatccagactccaccactcgctagggctgcgaccctggtgagtgactctatctccctgtacaaaatggggaggacgggagagaggatgcttgaggtggcacatgaaaggccttggcatggtgcctgacacacggttgacactcagtgagtggtggctgctgtcactgtcattgtcatttgtggcttgttgctgttattgggggcttatttattccagaaaacaagagaaatgtgagtatctgttggatggcccaggagaaatcctactgaggtcaccagctccggctgggacaatgtggaagtcaaaaggtcactatcattgttaaaaggaagcagaagagagtgagacacaatgagagtgcggtccttcagcttgtccgaatgctgtggtcctaacaagccacagaacttctcctgtgctgcactcattcctaactcattcattcatccatccatttaaccaaaagaattactgaacacctactaagtgccaggcactctcctagcactgaagatacagtggtgaccaagacaggtgtggtttctggttcctggagttcaaatctgttggaggacatggacaaatagtcagataattaccatcagtgtgataagtaccaggatgcaagcagcacaggacagaggccagcagagcccagaggaggcctcccatccaggctgggcagtcagagattctcaaattcctgttctagcaaaggaacaaaaataggaacctggccggccatggtagctcatgcctgtaaactcagcactttgggaggccaagatgggagtattacttgagcccaggaattcaagaccagcctgggaatcatagcaagaccccatctctacaaacaatttaaaaagttagccaggtatggtggtgcacccctccagtcccagctacccagcaggctgaggtgggaagattgcttgagcccaggaggtcaaggctacagtgagccatgatcacaccactgcacttcatgctgggcaacagagtgagaccatgtctcaaaaataaaaaaataaaaacttgaccggcttcttccagtcaggaagtataaataatcagtcatttacatattaagtgtgagttatccaatgagaaaacgcatgagaaagtatttagtaattggatttaggcattggtttttttgggggggggcgaggtaaatgttgaaataataaattatacaatagtaatgaccgcaattattttttgaatgggtaccttccggattatattgtttattaaaggattgagaacttccatagattatttgctgtttcccctgcttcctaccaccctccaaagacttctactgcctgggaccctccccataattcagcaaataaatagttaaagcctggcccagcagagaagtgtctaggggccctgctcctatggttctgattggtttgtatctggttgttacatttactaaatattattctggataatattaatatcactcataacatggggaaattgaggcacaagtgaagtaactcatacaagtggccaagatttgaacctctgattcagacctcaagctgttaacctcttggatagtagcaatgttacctgggacccagtggagactcacagaaataggagacccgatccctggcctcagggggcttgtaatctagccaaagaaagttcttaataaagttagtcatgggagtgtctggtgaaagtgtgattctctctggagtctgagaagagaggcttgcaagctggaggggcttcccttcctgggtagcaagggaaagactagccaggaggaggggtccctgggaggggctctcagtacagaaagcagcatgggctttggagctgccacactggctggctgaggactttcttcttctactaagagtggaagccttatgctttcatttccctgagggaagtcaaagcaagaagccctcgctaaagcacaaatcagctgctgcctcagtttcaccacctctagcaataagccttataccctccacatcctcccatatgtctctttcccttccagcatatgtcagggaacaacgtggtattggggaaagatcccagaaccaggctctggtcccacctcggtcacctcatctgtcaaatggtataaaaaattatgatgatgttattgagtttcagagacagcagagcatatggtgaagagttcaaattaaggctctaccactttcttcctggataacacttggcccattgccacacatctctgtgcccaacccctcctccaggaaggagaccatgattgcagtacttatcatctacagtgttataacaattaaaagacttaatgcttgcagagcacttagccccttgtcctactccagtcaatgataaatttatgtttgccgtcaccatctagggcaggaattgagcactcactgtgtgccagtcactgtgctccttatctgctatgtgaccttgggcaaagccgggtctcactatcctcaactgtcagacaatactatttggtgtgtgtttactgcatgttaagcacagaactgagcattttacatgcatcatttcatacgatgctcttgacaatccgatgaagttgatactatcattattcctttttgcaaatgagaaaattgaggcttcacaagccaagatcttaaccctatctgtgtcattataaagttccagtaagtttaaaagtactttggaaagtagaaagtactgcatctcttcaaagaatgtttactgtcaaatccagtttctccacagcctcagtttattgttttgcatctttaatataacaggatttgtagctaatatttatggagcattgactatgaccaagacaccattttcggtgccttatctgttttacctcattgaatctcataacaaccctggaagagagacataattattggctccattttacagatgagaaaagtgtggcacagagaagttaagtcacttgcccaagatcacacagttgtgatgtggccaagcagaaattctaatggaagcagaaggcagggagtctgggtttgggagagaacaaagctcaccctgggtttgtttattgctgaaatactttccatcatctcactcagataaaactgaacacacctctttcagatcttcagtttttcacagggccaatgccgctttctgtgcagaaagtttggaatttttttaaatgcaaatatttctcttctctatttaacgaccccacccattggatgggatattgggctttccctcaagagaccaccgtgcagggcatagtgggagcatttggatcagcctgtgtcaagccagctgtctctgatgcctggaactgcattctatgtgcccagttgccttggcagaccaagtgtggttcgcctggaacaatctggtgcccttgtctcccacatgtacacacacacacacactggtgtgcatacacccacaatccctgcacgcatgagcatgggctggggagggtagctattgaacacgcgcacacaaaatacccacattttgaaaccttagcagaactagttcatacacctggggcacagagttagcagcctcaataaaattcgaggcttgtgttagatcacacagtaaaacagaagcccagtttctcatccaagttctttctctctctctctctttccaaatggagctaaatttggcattaggctgacctccacccccaccacgagaacatcaaacacccggtttcagtatttatgacagtaaaaaccctttctcgcccttaatatatctgtcttctgtctgagagcattgcttttacagatgatacgatatcagtaaattttttttgccattatgtcataggcttgaccactagcagaggacaggataaactggtacccgttaaaacgttcgaagtcctggcagggtcttgctttcaaaagcgcagctcagctaaaactatgtgtcattgaggtctgccgtggcaaagcacaccgtttacctaacccaaggcatttggcttcaatctagttaaaaaaaaaaaaaagaaagaaagagagagaaagaaaagaaagaaagagagagaaaagaaagaaagaaagagagagaaagaaaagaaagaaagaaagagagagaaagaaaagaaagaaagaaagaaagaaagaaagaaagaaagaaagaaagaaagaaagaaagcaagcaagcaagcaagcaagcaagcaagcaagcaagcaagcaaaagcctctcaggtttatttactgaaattgtcatttcttcccccccccacccccacaccccgaactttaatcagccacgcaaagcacaaaacctacattcaactctgattttatgacaggaggctaactcctcctccgcgaatttatttcacttaactctcgaagcccctcccacttggcagccaggccctgcagcccccaacgcagtgctcccctctgaaaaacacaacgctttgcccatttccacttttaaagaccgattcgttattgtggagccaaagcccctccgcaatcccgaccagatgggacattttcatatcttatgctccttatagttaaccccctcccataagatccaagtggtgtgataccaggactaaatccaagagaagggggaaagaagcagaaacagggaaagtacagtgtaatcagatccccaaacaaactgatggtacattgcactttaaaggggtagctggaggactctatccagcaggcacatcaaaaagggggaagaaaatagtttaaatgtcccagagcatccgctgctgctgtaactgttagaaagcaaagtcttccttactatacttgctgtatagtaaaatgccaagcctgttctcttaaaagaaaaaaaagtaataataataatactgcagcgttatggcatttgctgtcaaaagccgagtgctgaaacggttaaacagccagcggttagtagcgagaatccctcccggtgtcccgtggagaggaaaatcctcccgacagactggcctagggaatcccggcctgggacacttccctgcccccgcgtaaagttgtccaaagtcgccttcccaagtgtcccttccctggccggggcgcgggcgcccctccgcgggccccgctacctgtgcgccgagggcgagcggggtccccaggcctcccgcaccgacctctgccgggagctgaaagtgctgcccgggacgggagcagcaggaaagggccgggaggagcgagcggaaaaggctggaagggatcgagagtcagttaccttggtccacagaccccatgatgcggaggggatggcagtgccccagtctgaacgcagcctctctctgcatctggagggcacggggacttggcgcgtgtttggaaagggggatctgtttgtatcgaccagcagccgaggggacgccgtcttctctaccgcgtgcccgcggggctgccctggccgaggagcctcggagcgacccgggagctgcgcgcctcccggctcccggctcggcggagtcggcgcggctccgcgatccggcttactccagaggcaacgcgacttccttccccgcgctccgtgtttataggctttcaatgcagtaaaataacgggattccctcactgtttcctcctgtttatccagcgccatggaaaccactggatcccgtccatctccaaaactaagggctttcctgcaaacttcacactcaggaatccatgacgtcgcctcctccgcggccagccagctccgtggctccttcggccgccagcacaagtccctgattgttcgggagaaaagtctgggagagggagcgaagcgggcgacggcgagaagaagggggtgggggcgtgcgagtgtccaagtcagccctgcaggagctccaggcggctgtttgcaaggagtgcccagccaccgccttccctggcccgtggcagcttttcataaatcaagcccgagactcccaagccccccatttgccaagcgggcgcctcttggagaaagctgcccagggttcaaatcaacaccccaggttgtccaagctcctggacgtttgcccaggggcccttcccagtccctcacggcctctggctgcccagatttttgtgtgttcaaggatggtggggaggaggaagaggagaaggaggaggaaggaaaagaaataaataacggtgccttgtgtcaactctccaacttcgagaattttttttcaaagagtttatttttagattcatttagaaaatccaaggtttccagtgatgctcagaggctccagaaataatgaaatggccaaagagaagctgaaaccaggcaacccatgtgtttacacatgctctgaataaacaggaaaataaagagaaaggatatcatgaactttgcacagtgtccagaagaaagtccttgcgatgccacgcatggttcacagcaataggccacgagacccccagaaggtccgtggggagggggagagggagaggtgcagcggtcaagatgccttttctggacttggactaggtctgcctcttcacctgcctgcagggtgggaaattctgagcccaaagataaagctggctttgaaaatggacttcagatactgttgtgagctctgataaaattgtggatagcaaccaaggctggtgactcatcacatacacaccccccctccccccgcacgctcttacagagagacttgaacttaaagaggcatcgagaggcagctggctccatccgtgggaccactctgttttccagtactggcccacaatagcctcactgggcagctcgcagacataaccactcctgctggagatagatgctggcccacagagaccagctggaactgcgcctgagaaagccccacccccagccccgcccaggggactctcttcaagcctgcctcaaccagggtggcctccagcaggacagtctaagtaatgctgctcccccagagagcagccattatctgtccacctactgtgtgccaaggaattcaaggtagggaagtctcactgactctcgagtaactcaaaaatcgtggcgccaccaaatttcttgcaaccaccctgcaaggaggggatcctctctcccactttccaaaagggaaactgaggcacatagaaggcaggtggcttgcctgttgatttacttggcaaattctggggtgcagcctttaagggcgtagagaggattcttttcagtggagcctattgaggaagactcattccctgaggcctccttcaccaaccatctgaagcaagaacagggtgaccaaccttcctggtttgcctgggattgagggggctcctagaatgtaagactttcagttttaaagctgagaaggtggaaccttccacccaaggtggaacttgggacaggttggtcatcccaggcgtgaatgaaactcaacttccttttgccagtatccagacaccaaggaagcctgctaaccattgtcttctgcagacagttactacacttagtaacactatgaatggcaacccctcacctcagtacctactaggtgccaggccctgagctagagtcatctataaattcccactcacaatcccactgcaaagtaatagactaaagctgaaaggggttagccctgtgccatccgatatggcagccactagccacatgtggctattaaaatattaaataattaacaaataaaatgtaggtgtcagttcttcagttgcacaagccatatgtcaagtgctcaaaagcccacatgtggctggtggctaccaaactggacagcacagaacagaatgtttccatcaccgtagaatgtcctcttgggcagtagtgggttagacaacctgagaggccatttagagctcaggctctacagtcagatggttggctttgccatggcatcactcaccccactctgtaaaatggggacactaggaataccctccttaaagacttgctataaggattcaatgagtttctttaattgaagtgctaagaacagtaaagcatataacaaatcctaaaaaaaaaaaaaattttttttgaagaaaaccttcccacagtcaagaaatgagtagtgattaagccaggagtaggattattagactcggcattcatgcccttcctctccagggctccctacaactgccatgtccagagcatcagacaagcttggcaaggtctgtttcctttcaccctcccattgagcttgatgctgtgagccccatttacagatgagcaaactgaggctctacaagttgatgtgcacacagccagtaaatggacggcccagagttgaacccagctctgtttggcaacaaagcctgtgttcttggcaccatatcccctgcctcccagaatcctcccttggtaccgaggttttagaggccagaagcgagaaaggaaacaagcttgctgggccctcctctggcggactcattatcggggataaatttagactcagtcccacccaactcaggcctctgaggcgattccccaactccacaggtgcccagagctgctgagcaggggatgtcttttggaactcgatagaatcagcattagccacatttttatagagcccactctttgtcacggttaagcgtttttcccttttaaagcacattaatactacaagggctggagccggggcagttgcagctgagtcacctaatttgcccttctgggctgcagctttcggcttcttagtttagccgtcctttggttcctcagacaatttctttcctctcccagtgccagggcaagaaatattttgtccttttgaactgaaccacccactgtttttcacttctctcgagcactctcccttttttaagggatgctccaaggggggtgggtggggagcttctgcccactaaattatccacgaaaactcccaaaaatagaggctctcagctggggtgggaatgcaccagcaagtaaggaaaaagcaaaagagaaactgaatcaaagcaaatagaaggcgtccaggtggccgtagggggaatggtccagggaggctgcagagacatctgggttggaggagaccttgaatcaccggggaagccttttattagattctcttccctccatcagcctcataaatcagaaacacaggtatttctgctgagacaccacttaagtgatgctgccccaaacaactgattcaacaccagggttatttaaaaggactagggcagcttaggtgagggcccttctttgcatcgctcaagtgttatctctgtgccaataggtccccttgactgtcaaccccttcctggctgaaatgtagatggcagttgagaattgttctagatttctacatgtctcatacatagaaagtaggaccaacgcaggtgtccgaaaggtttattgacctacctagaataacaatgaacatttatagagcaattgctatatggtaggcattaactcattacatcctgatgacaactttatgatgatcattttccagaggagaaaactgcagcacagagaggttgtgcagctttcccaaggttgcacagccagtaagtggcagaggtgggattggaaccccagccacctggctctcgggtgttttctgaattgctccgagaagctccctatcaaatatctgtttgccaggcttattccatgggcatggctcaggctaagtggtgggggtggggtgaggacacaattagaagtcatagtccttgcctcctacttggttgacaaggacaccacaaggccgaacgagcagtagtgatcaacagcagcaacaggaacgtgggctggaaatgctggaggtattcacggaagttggtcagtgcatcctggtgagctctgaccaggggtctccaccctcccagctggaacctggtggttgccattcctgaacatcctccccttccattgccacatcttacagatagatctcccagctctgaacatcttccctcggaaaaatctctcaaattcactcgtggccattaaaattttaaataattgcagggcgtgatgattcacacctgtaatcccagcactttgggaggctgagccgggaggatcacttgagttcaggagttcgagaccagcctggccaacatggtgaaaccccgtcactactaaaattacaattagctgggcatggtggcgggcacctgtaatcccagctacttggatggctgaggcaggagaatcacttgaacccgggaggcggaggttgcagtgagctgagattgcatcactgcaccccaacatgagtgacagagcgagactctgtctcaaaaaaatttaaaaataaaaataactaaaataaaatgttaaataattaacaattaaataaaatgtaggtgtcaattcttcagttgcacaagctatatgtcaagtgctcaaaagcacacgtggctggtggctaccaaattggacagcacagaacagaacatttccatcaccgtggaaagttctcttgggcagccctgggttagacaacttgagaggccagtttctcagagcgattgagaaaacacttgagagccaggtggctggggttccaatctctgccacttaccggctgtgcaaccttgggaaagctgcacaacctctctgtgctgcagtttcctcctctgtaaaatgaccatcctaagattgtcgggaggatttaatgagttaatgcctaccacatagcaattgctctataaatgttccttgttattctaggtaggtcacttctcttcctctccacaataccagccttgccaggacccccatcaacatctctctcctggtgactcttcggcctcttcgcctcctcttctctcctgttccttccctgaggtctattctttcctgcacaaccaatgtgatattttctcagctttagactctaaaggggacatgtgaccatgtcatcctccactgaatcacaattaccttgcgggtaaagttcaaaatcccatatgtgaccaatgacctataaaatctaacccaccttctctagtctcaccaccacttacctcttacacccttcaactccacacccctgcctactgaaatactcagcaccccaccccctgccaattctccctgttattcctcacttccaggctttccgctaggctgttctctctctcctcccaccctcaagctcctctctgtgcttgggtaattctagtggcctcccagtcttgccttggataacatttcttagggagaagtctcagcttcctcatctataaaatggagctacatctacttcttagagtgatatggtttggctgtgtccccatccaaatctcatcttgaattcccacgtgttgtgggagagacctggtgggagataattgaatcaagggggcaggtctttcccatgctgttctcatgatagtgaataaatctcacgagatctgatggtattataagggggagttttccagcccaatctctctctttgcctgctgccatccatgtaagatgtgacttgctccttcttgccttccaccatgattatgaggcttccccagccacgtggaactgtaagtccaattaaacctctttcttttgtaaattgcccagtcttgggtatgtctttatcagcagcatgaaaatggactaatacagggagatatgagcatctgagaggccaatgtatctgatgaagcactaagcacagtgcccagtacacagtaggtgctcaataatggtagctacagttactatcatcttgccactacaaacacctgtcatgctttatcacccagctcaaccaaatataccatttcagaagtgccccatccctcttagaataaaattcaattcctcaccaaggctgatgtagccagcctctagagggtcctagtggctcccaccttggtgttcctgctcctgggccatgccctcctaaatgggcaacacaaggctactgcagaaatgagatgtatgacttccaagtctaggtcataaaagatgtgtggcttctgcactgctgtcttggatcacccaccttgggggaagctggctgccgtgttgtgaggacacacaggcagccttttggagaggcccatgtagtaagaaactgaggcctcctgcccacagcccgcatttcagtcaacccttcagatgactgcagccacagccaatggcttgactcaggaaaaaccctgaaccacccaactaatctgttcctgagccacagaaactatgagatgataaatacttgctcgtttaagctacaatgtccagggggaagcaacagaaaacgaatgcaacggcctctgaggtccggccctacccacctatctggtctcccatctactccccatgagccagacacctcctggcttttgtgcttccttccctttggcctgggaccctttgtccctacatgtctatggctggcttcttccatcttctcagcctcagtttaaatgccatcctgtgaatgcattcttccatgaccctcacctctgaaataggttcctctgccctgaagctcaaccccaccccacaaatctcagtcccaacgccctgtcatatttctttatagcatttatcacttaccacaaataaattacatattcatttgtgtattctatgtctcctttgcctcccaactaaaatatcaactctacgaaggcaggaactttgttttattccctgccgtgtcctcagcacctagaatgatgcctggcatacggtcggacctcaaaaatgtttgttgagtgaataacacaatatgaaattgtctcatctgtttgtttacttggttatgactcatctctccgctagactaggaaaatagggccatgtctgtcttactcgggacttggcatggtgtctggaacgggtggtactcagtcaattatcctatctagcatctgtgacggacacagggactaactcatttgggtctcacaacaattctctaagatgaaggccactattatccccattttgcaggaggggcgggacaaactgaggcagagaggcccaaggtcagcaaatagtaagcgacagagtgtgaatgtggagagtggcagcctggctccagagccagactcccaggtcctgtctatgtttggtgaatgaatgaacgacaggcacaaccatgatggtctggccacctgctcagcccgctggagagaaccctcgctccgtcacatggccgaggaggtgggtgaggtgctcagctggggttggcagaggagaaggaacggggcggtggctggcagctggggaggccttccccatctcctagcgatggaaagtttcacctcatccggaaagaactcccagttccatggttgtggcagagagtgaggtgtctccccagccgggttcgtttcaaaatacattgtcttgcttttaatagcctccctgatcagctcttggaggttctcatgactgactgttcccaaaataatacccggcgccgctttttccaactcagaagtgctgaatcttgctacctcccaatcagccgctggctgctgcaaagaactgtggtaatcccagggtcccccaagacagaatgtaacccaacagggaggtttctgaggcatttggagagaaccccgatgttcctcggcagctcacagggctgctgacagcaagtttccggtgacagcctgcccatccacggggctccctcgctgctcccagctgctgaactgagatgtgacagtggccagcggcagccctaggaacgccccggccctcagagatggagaagattttcctagaagctggagagctgacgtggagtgagagggaattggcttttggccctagaggctgcgatcagcttggcttgtctttctccctctgtgggtagaagaagcggggcggtatctcgtttgcagttttttgagagtgaaccttgaaacatcaagcatctctcctgtgaaaggaaaggactgaagtacctatagctagactattttttcttatattttaaaaatcagacaggctatcttcttcctttgtgtattcattcaatagacattgtcatgtacctaaaatattccaagcacttgggatgcagctgcgagcaaaacagatgcaggtgctgccctacaaggctttcagtctagcggggagactcagaggaaacacacaaatatagacaacacagttgagtggtgacgtgtgccaagaaaaacacataaaggagagcaggaagatatggagggctggggaaaggagccttttttagtcagggtggtctggaagacttcacagaagaggtgacactgaggagaactgaatggcttaagggagctggccatgcagacagctgagaaaatgcattgcaagctgcgagaacaagacgtgcaaaggccctgaggcagtatcctgtaaaatagggagcctgccatcaccagaaagagtcatttttttcatgcatttgacaagttttctgggcactgccatggggccctgaacttcatgctgaagatacagacagaaaacaagacagaaattaatctcttcagggagttcatgcagtcggggcgagagaggtcaactgacagtacaaaacagtgggcaagtgcaaggatggaggaggcttgggagccgagaaatatgtgggagggcacaaaacctggtcacgttggggtgctggggtaggccttcaagagcagtgacatctaaacagagtcaatccataatcatagtcgctaaaatttattgagtattcacgttgcactttgtcctattccaagtgcttgacatgtgtattagtctgttttcattagacatacccaagactgggtaatttataaaggaaagagatttaattgacctcacagtttcacatggctgggaggcctcaggaaacttacaatcatggcagaaggggaagcaaacgtgtccttcttcatatggcagcagcaaggagaagtgcccagcaaaagggagaaaaaccccttataaaaccatcagatctcgtgagaactcactcactatcacaagaacagcatgagggtaaccaattccatgattcaattacctcccactggatccctcccatgacgtggggattatggaaactacaattcaaggtgagatttgggtggggacacaaccaaaccatatcaacatgtattagcttgtctaatcctcctagcctttgaaaattcaaatatttccccttttcacagatgacaagagaggccaaatgacttgccctaggccacatagtggaagagctggaaatcaaacctttaaagaggtgggacatattctccactttcccttctctccttcccgctaaaatatggatttgatggtaagagcttgagcagccatcatgggccatgaggtagaaactgtgttaaggaagacagagctgacagatagaaggagttcaggtccctaatgaccagggagcctccacagcaaccctagatctccacccacattcttcttgagagcgaaataaatatctaacttacttaagccattgctgtctagggatctttagtacgacagctaaacctgtgccctaaccaatatggattctaagagtaatgaagaaccatcgagtatggggactctgagtgacacgaacagatatgcactttagaaagatggccatagctgaagttaagagtcaggctcggccgggcacagtggctcacgcctgtaatcccagcactttgggaggctgaggcgggcagatcacaaggtcaggggtttgagaccagcctggccaacatggtgaaatcccatctctactaaaaatacaaaaattagcccggtgtggtggcgggcacctgtaatcccagctactcgggaggctgaggcaggagaatcgcttgaacccaggaggcagagggtgcggtgagcctagactgtgccattgcactccagcctgggggacagagcaagactccatcttaaaaaaagagtcatagcttcaggagatatacctaatgctaaatgacaagttaatgggtgcagcacaccagcatggcacatgtaaacatatgtaactaacctgcacattgtgcacatgtaccctaaaacttaaagtataataataatgaaataaaataaaataaaataaaataaagagtcaggctccagggccagctggtctgtgttcagatcccagctctgcttctccctagctgggtggcctttggcaggttacttaacttctctgtgcctgggtttcctcgggtacaaaatgaaagtaatattacccattggagagctgttgtgaggatgaaatgagttagcacatggaatggtgcttaaaatagcacctggcagatataagaaccttaggctctgtgggtgcctgggaccacggcaagcccagaaagatgtctaaggagctccaagccttcattagcactcagaggaaacaggccatgagggagaacacgtggatggagcagtgacccaggaataaagccaatgggccctggggagctgtatccagagtggggcataagctggtaatgggccatgttgcagaaagccacctcagcacagtccagcccaggaagccgtgcctgggagccccacatggaaacggggtggttgctctgccaggagaagcgtgctgcacttttcccctccgtgggctccctggaagataagaaaccccagcttcctgaggatatgctctgaaccctcctgctggctcctctgggcttgtcaaaatatttctttgtggagccatccctgtttttccattaataaaagtatttttgggctcccagcaacaatgagtgagtgttacaaaagaggttgggccttccaaggtaaacagagctcatccccaacctcagccggtggctctgggccactgagcaggggcgtggttgttcttattctggagctctctgtgctctgagccctgatttggcacagggagagcaggttctaggatgggctgccctatccacagcagagggccctgccagtgctcttcagggtcccccgggcttgcattgccagggcatgctgcatccatcttccctccagctgatcagtcaatcagtcaacacacgtctgttgaggtcctgctctgggcccagcaacacacagaaaagatacagtcttccaccctattgcagggcaacagatgtgggagcaggtgaacccacaggtgccatggtagatatctccctggagacaagccagggcagaggggagagaagcacctagtgcagcagtgatcactatgggctctgtgttcaaactgggatctaccgcccacgggccatgggactgtaggcaagtgactcaacctttcagggagcaagtctcctcatctgcaaagtggcaatactaagtaagttaatataagaaacatgcttagaataaaaccgtacacaatgcagaagtgttcgctattaaatcattgtcaagaaatcaatatttgttgaatgaatgaatgaatgaatgaatgcatgaatgaggaagtaggtggatggatggatgaatggatggagtcaatgtgtcagtaactgtattagtaatctcttgctgcataatacatcagtccaaaacttagtgtcttgatgcattcataaacatgtatcatctctcattacttcaatgagtcagaaattcaagagctgcttagttgggctctggcttcttcattgtgttgaagtcaagatgtcagccagggctgcagtcatctgaaggttggactggggctgaagaatccacttcctaaatggctccctttcatggctgtcaagttagtgctggctataggcaggaggcttcagttcctccccatgtgggcctctcctcaggaccgcttgagtgtgctaacaacatggcagctggcttctcccagagtgagtgactgaggagaaagggaagcagcagaaccagaagctgtgaccagcggtcagttttaccacatcctattccttagacgcaagtcattaagtccagcccacattcaaaggcaaaggaattggcctttacctttgccctttgaagagtggcgtgtcaaaaaaaacttacaagtatagtttaatcatgacagtgaccaaatagatcccccaaacagatcacaaaggcctcaaatactagcttccccagaccaaaggagtatgcactgtaggaatccattcattcaaaactttggaacagtccaaatcaatttgcaaggtagcagtcaagtcaatagttggttaggtgggggaaggagggatcaattgcaaaaggcaatggagatgttctgtattttgactgggacgatggtcaaaactgattgaactgtacctttaaaatatgcaattcattgtatgtgaactgtaatttattaaagtttatttttaaaaataccagcttcctgactttgagtaaactattcctataatttctttggtctaggtcagagattgacaaattttttaccagctctggtccattgcctgtttctgtaaataaagttttattgaaacgcaaccactcacatttatttacagattgtctatggctgttttcacactataatggcagagtgacacaattgagtagagcatatggcctgcaaagctgaaaatatttactatctgggtcttttacaaaaaaaagtttgctggccgggggctgtggctcatgcctataatcccagcactttgggaggccgaggtgggtggatcacgaggtcaggagatagagaccatcatggccaacatggtgaaatcccgtctctactaaaaatacaaaaattagctgggcatggtggcgtgcgcctgtagtcccagctacctgggaggctaaggcatgagaattgcttgaacccgggaggcggaggttgcggtgagccaagatcatgccactgcactccagcctggacgacagagcgagactccgtctaaaaaaaaaaaaaaaaaaaaaaaccaattttgctgaccccaactctagagggaaaactaggaggacagtttaatgctactttagatgcatccattttcagggccaaatgtatgccaatttgtcaatctttttaccctaaaactgtagcagccctcagctcatgtgtgtgcacagcaacttctcccagtagcagacagatgtgggaagatccaagttctcccggaagatcccacgacttgtctgcatttgggaactgttcgacatttccttagaagtgctttctacagcccactttttagtgtctgggacccctgcctgagctggtgaatcaagaactcggcccacagagcaggagacacgggcagcacttttgggggattgtctacatttcattaattatgtttatctacatacaatttcttttccttcttccctttcttccttccttctttttctctttccttctccaaagacacatcggtccaccaggttggctgtgtgggtcagattctctcaaagtgattctgtttcatggtgttgactcaacttgtagtcaggctggcagtataaaattgcatctcaatcagctttaagaacaaaacttaaaaaccaaaatgggaattacaaatgaaaggccgcagggagggcaactgtctgccactatcctctccccttaaagctaaaaagtcagagcatgaaacagcaggagaaagaccgtctcagggtttcagtcccagaagaccctaaacccagactggggaggaggggcctgggggtgagcctgctaggggcatccaccctgcaggaaggcccctgtccatagtcattgtctttgccccaccccttccccttcttctggaaatagtgccccaatttttactttgaggtcagacctttctgactctcagcttgtgcagttggagaggggctgactctctcagcgcttgggatgggcacgtgacccaagtcctcctcatcagcatcagggtgatggtctcgggtcaatgagaatccaccccaggactgtagtttgaactgccaggaaagcaaatgtctctcacacagacgttctctctatttcctgctgagatgtgaggatgaagatctgcaactgctctccaccagcttggtgcactgcactctataccgcaagatgtcacaggagaagacggagccaggagatggaaagagattggttgctgctgacgacatttgagcccctaaatccagccatccctgaagctagaggaaactccatatagcttctcacatatataaaaacatttcttcctcacttaagccattttgaattggatattctgtcacttgcaacatctcctatttcatccacaggagtttgagatctggagacctggagaaccggagccccagctgctggttgctggcagtagccattttactgccatgaagaaagccagactgagggcaaggccaacgcagaggggagcaaaccaaaggaaatgcagagaaatagatccagagccttgatcatgcaattcctgaagcccactttccccctaaagttcccgagagtgaggagatacagttccctaaggttaaagccagttcgagtcaggttttgcattacttgtggccaaaagagtctcaagtgacacattcggtcttcttccatgtaacacagagataatcacacttacctcaaatagtggctctgaggaatagagaccagatgtgcaaatgctcctgcccagagcctaacagacagagcaggggctccacagatgcgttcccactgcttctctgacttattttctccccattcctcgctgctggtcccgtgcagcgcaggctgagggccatgtcattgctgattcaggccgggtaggacaaggcctcaaggtacagtggtcactggtcccacagatggaatcaagtgcgacacctcctttctgcaaagacagggggcagtccaggggcaaccagagctggggcttcacccagtcctcccagtaatgcatgtcagttgactccccttctggtaacacagtgcccccatttctctctggcagtccactccttcctatctctgtactcttggagggggcttcatccccagtttaaagttgagtcatgtgacgaaggtgtaagcctatcagcctgtcacatttcccctgaccactggtgattggttcagggaatagcatgtgacccaggcagtgccagcgttacccaggagtctctgctgggctctagatagcagctcagtctttcctgctggaaatgcaaggggaagaagaatgtggctgtcatggaagcaggagaggacaggtaagggagagtcagtacagcagaggtgaaaccaaaccctatccacgttgtctgaactcctgaatccaaccaagcctggggtccaccctggaacttttcaataagaaattctttttcattacttcgaccagttggtgaggttgctaagtttagcaaataaaaatccaggcttcggattaaatttgaatttcagatgaacaacaatattttagtatatgtgtgccccatgcaacatttggtacctacttacgctaaaaaaaattattcattgtttagttgaaattcaaatttaactgggtatcctgtgctatatgcagcgaccctactagttcgggccaggtttctcattctttgaacgcaagagagtctgaactgaggcccagtcccatccccttcaacaagggcacaggagtgctactcctcctgccgcgcttcacagaacagggccccccactgcccaaccacaggggttagcctcggccactccatcagcctccttcatacctcatttctcctgctagcaagggtgctacccacggcagtgaagaaccgtggccacagctcctactggggatgcctactgtgtgtgaagggctaacctgtacccttccacctcctccccacagcacgattctaagaagcaggcaaactacagtcctcatcttatagataagtaaagcagctcagaggctctgtgacccacccagggtcccacagctagtaagaggtagggctatgtttcataccaagcccaggttctaggaatgacacttccaagccggaggggatacggaaggagctgcctctccacggaaggaggatccttccgaggaagcccagtagccgccctctggatagaggcaggaggcctggggaggtctgagtcactgtgtggctagagagcaggggtgctgggatcagcagaaaacctagcagactctctcccttagggatttaaaaggactgggcccagggaaaggggaaggacattggccaagccatcctcagacagcctggggagcagaggaagccggcagctggcgggtcacctgggggcaggtgccccacctcctgcttctcacctccttggcgtttcccaggcccctctcctgaaggcctgctcactctcaacctctgttttgctattttgctttgttgttttttttttttaaagttcctttgttgttaccacttaaaacaataaataaataaggcaaaccaacaacgcagacatctggaaagctttgtggaaaatggcatcttgttcagaggacccgccctccccggagtcagaacacaagtgcccacgggactctcaactggcccccgaatgctctcagaggagaggtgagaccccctcactgttctcctaccaaatccctgtcttcccctgggggtcatgtccctcccaaaacaccaccacctccatcggcatggctctcagctcccattctgcaccctgaccaggctgctgagcctccctgacttacgcccagcacatccccgaccctactccatcattttccctcccgcttaggtctttttcattctggcagccatgccccatctcggacttgtctcatttctgacccatcacaaaagcctctgtgcctctcacttcacctcttctccttccactccacctgacccttcaccccacctctgctaaagtatcttctcagagtacacctcagatcacaatacccctttcccctgctcaacaaccttctaggccaatgaagtggctcacgcctataatccgagcactttgggaggccgaggcaagtgggtcccttgaggtcaggagttcaaaaccagcctgaccaacatggtgaaacctcagctctactaaaaatataaaaattagctgaagcgtggtggcgcacacctgtggtcctgattactcaggaggctgaggcaggagaatcacttgaacctgggaggtggaggttccagtgagccgagatcacgccactgcactccagccttggcaacagagtgagactcggtctcaaaaaccaaaacaaaacaaaaaaaaaacctatggcttcctagtgtctcctgaaataaataccagcagctcctcactgtgatgttaaaccttcctgcaatggatgtcttttgtttttatttttccagtgttcctttttccttcttttggtaactccacccttggtggttttcttgagggtcagggaatcgcacctccctaactttgagtccaactgttttagggtctacccacaatgccaggtccaggaggaggttgtgtgacccaggctgggccattgagtgtgcagcattcccctgaacaaggagttggttcagggttggccacatgacccaggtcaggccagtcacagccaaccctaggtccttggctggaatgatgaaagaggggctctctctgtgttggtgtcaccaggctgagaagatacaggtcaggagctgatgagggccatcaagccaccacaaggggagagtcgagggggagcaaagctgtaagatcaagaaagaactggtatttaaaacatctttaagttcctgcatacagctgtgcctgaagccagtcgacccacactatttttttaggtttaaactagtttgagatgagtttctgtcactggcagccaaaggcattgtaatgaatatagtctccaatcatgggttccgacttcctcttctagctttactctattttcctacgtgcgtcagtgcttctgagaaaatggtctcttgaacagccagtgaaacataccccatatctcagcctctgtgcctttggtcctgctgcttccttgacccgaaataccctcttctttgtaaatactgctttacaaagctctaatcctcccttaaggcctttctcaagctggtctcttccatgagaatgtcatcactgtcattttcttactttctgtccccataatgctctccaagaacttattgcccttccttgaatcctggtcatttgtatatctcctttcccttctcagagttagggactcagatgacaaggagacattattgttcagctcttcctaagcacaacacatgcacggaacagaaactcaggaaaagcatctttgtgctcatggccagcctggtgaagcctcccaggactcactcacctgagaccttaattttgggacagatgttctgcctgcctgtttcacattcattatcccatcttttcataccagtaccccaattttcctttgaaggaccactccatctccatcctcattttttttccatcaccctttcctggtatccatcctcattcttaagacttaggtagagcccttccctccctctctctgactccacagatgccatgtgacccagacctggccaaccagggcactgcacactcctaaccccagtgattgtctcaggtttggacatgtgatcaatgccagagattcaaacatagaacttttgctggaaccattgagaaggggacactctgttgaatgggatcagaaaactagggggatgtgagcctgggctgctggagccaccaggaaaagaagttctgcctgaggaaaaaaaaaaaaaaaaaaagcaaacataaagcaaaacagagccaggacctagaggcagatgcttcatatcatttgcatcctagatccagccatgtctgaagccagtcctactctgtacttttagatacatgagtgaataattcctaacggattgggcttctgtcacctgcaaccatgagtctcaaccgatacaaggtccaagtctttatccccatccttattcctaatccagagcacatcaggtggtctttagttagtgatcagctgactaagggcaggacttattctctgccttgtcactgatccttttccctccactgcacaccccaactcttactctagctaagacctacccattcttccagtctcagcttaactgttactcccggaaagacctttcctgacactcccagaaaaaaattggtctccccctaacacctgagcctcaaaacaccccaggttttctttctcacagttgatgattccataattgttggagaaattaagttttctatatctgtatctcccaaacctgcaaacttcaccagccatacatagtctcatttgcttctacattttcagggcccagcgcagagcctgacatagtaggtgctcagtaaatggctactgaattaataaatgtactgacacaactcaggaatcaaagaatatgtctcccaggtttctcaacttgaataaagatggtggaaccatgtctcttactactacctggtccattgatggagggttccaggagaaccagccgtgggagggcttgaagagaaattgcctctttgtgccactccacagaggtattagcatattgaacttgatcagaaagtccaacacaacttgcgattcattactggagaccttagccacgccctgaagcaaatgtcaaatttcacacatttaatgaactccatacttgaaatatgtggcctgtaaaatctgatttacactgctgttaaaatcctcagtgcctaaaaagtaatgtgaaaagtatgtattggtgctaagagaaggggcttttttttcccaagacattaattcactccaaggcatataaacgttccctaaagcatcatttcaattgcaatatttctttcagcacctcaaatttagttaccaacttttaagaagaggggctgtgttaggttacacacgaatggaaaagtgccaccatgtaattgtcaattctctggaaggtaagctgagttgacagctgagctggggacagccccgaagcaggcagagcacagcttacctggcactataattaagacctgccttaagtcaacaccgacgcggccacggtgcctggcaagatgaatttcttttttcaattcagccacaaccttatttatttattggatgctaacacctggtatttctttcgtctggaagttcgcggcttgctttggcacgttttaggttcagtaccgcggggtggctgagctacctgacggggtgacaggaggcctccctctgaggtggatccatggagcagaggcagcacaaaccaacttccaaggacatagtctagaccgaaaaggacaccctgaccctcgttttcaagctttactggctaggagaattccgtccacagaagctgctatccttgagagcgcaaagcatagccgatcgtgagtgctcggcacacggtcatcccatcccggcttgcttccggaaaactagagcttgactctgattggcctttatccatttccttcacaccagtgattgatctaggggtgggcgtgtatccagtgctgaccaatgagatgtgagagaatttccaggaaactctttcaaagctgatcaaaagagacggcctagaagagagcgtcctcgtttttctaaagttccactggagatgctgagagttaccctggtgtggaactcagtgccttcattggacaaagtaaaaactgaagcttatagagaagtgatagtcttgaccacagcgagtccagtggcaacgccaacattattactgtagtggacatgtgttactctttgaccaccaagcatctaagtcaccctttctcctggggaaagcaaaaacaatctctctggggaattacttcctccccatggcaggcagtcttggaggaactgtcaatcaaaataccctgccatgtaacccaaacttggcccatcagattctcacacgaggatgttgacccttgagtgatgcaagatgggagtgatgtggtgggggtggcgggataagaaacctgcaggtgataaaacaggctgagggacctggttgcacggcatattagctcctgctacctcccatttccggcatgccctcattcttgttcatagccaaagctccagtctgtgagccactccacatcctggcaataaatttcccctccccgtttcttggctgaactttgccagttctaatttttgttgtgtgcaaccacagaactgtaaccgatacggaacaataagttgattgtgaccatgccgggcatatcacatacatcacatttatttttctttcacaatatcacttatggagtgggcacacatgcacacagacatctacccattttacagatgaaaaatctcagggtcagactgcaacatttgcccagcatttcatagttaataaactgccaaccctgaaatttaactgtatcttgttttgcttatctgtgagatgagtttaactccacttagcctgcaaggttagagtgaggatacaagaaaatacaggtccaagtgcctggtacacactctcatttggaacttccatggctctcagaagtgtcttttttgagaggcttttcctaggcccatgagagattctttcaggagttcaaagagctttctcatccctgaacttggagaaagaaaccagtcgtacttggggtaacaatgtggtctggagtatgaaccatatccttgatgtctctggctatgggaatccatgatcccgggatctggagtctctcaacatgacatatagtaggcccgctctgcacacttatctccaaaggtcagagggtagcttgctgcctggcatggtggggacagactcagggtacatagaagccttcctactaggcaacaatacccatttcctgccactcttcagcactggctgccattgctcttcttcctgttcctgaaaactctgaacgcttcctgccacagggcaatttgcacatgatattttctctgcctgcaacactgctccttgcgtctatgaatcctggatcctctcacctttcagatttcagctcaaaagccaactcctcaaggaggctctccctgaccaccaagtctaaaaatagcctcccataccctccccactcccaacccccaacctctatcccgattggtctcccagatggcatcctgacttaactttatgataatattcatcactgtgcaatgaattaccatatttgtttattcatttattcatttcacgtctattgaacactcaccataggccatctttttctaggcattcagaatagcaaatgagtcaaagtccctgtcctcacagaactcacattttagtgaccaagactgaggctaagcgcctgaggacaagtagagcaagcaaggggctaggaagtgacagggctacacatccaatgggaggaggtcaaggaaaccttttttttttttttttttttttggagacaagagtctcgctgtgtgccccaggctggagtgcagtggagcgatctcggctcactgcaagctccacgtcccgtgttcacaccattctcctgcctcagcctcccgagtagctggaactacaggtgcccgccaccacgtctggctagttttttgtattttttagtagagatagggtttcaccgtgttagccaggattgtctcaatctcctgacctcgtgatccgcccacctcggcctcccaaagtggaaaacctctttaagaagggacaactaaacgacgacctgaaggaggcctgtttatttctccactgcctaatatagacactccactcagtaagaaagcaggacccatgaacatctagatcatcacatccccagtgcctggaagctgcctagcatccagtaggtgctcaataaatatgcatgcaatggctgtctactggtgcttccagacagtgctgggctcctcccgtcccccggggtgacgacatctccacagtgactcatggttcgaggcctctacctcattctgaggttggctctgctcttaattagaaggtgggaacagccacaatgacagcagctagggaatgtggcaattccctgggaagtgctatgtcagggatggaggtgaggatggcccttgggaatgatgggattcagataaatggagcattaatttggaaatctgccttggcatttttcaacctcctgtgacatgccataaaagaatgcagcttgctggagagaagggaggctgttgctttcaccaggaggcttgaagttgaattagattatagcttaaaagaggcagctgcctctaagtctgtggacctgagcaccaatcctggctccatctcttacaaattgtgtgactttgaacaagtcaccacagctcttaaatcctcatctatagaaaagacaatgaaggccgggtgcggtgactcacacctgtaatcccagcactttgggaggctgaggcgggtggatcatgaggtcaggagatggagaccatcctggctaacgtggcgaaaccccatctctactaaaaatacaaaaattatctgcgcatggtgacgcatgcctgcagtcccagctacttgggaggctgaggcaggagaatcgcttgaacccgggaggcgaaggtagcagtgagccgagattgcaccactgcactccagcctgggcgacagagaaagactccgtttcaaaaaaaaaaaaaaaggaacaaaagataatgaaaatatccctctttgaaacgattctgtaggtaaagcattttgcctatagccatagctgctgttgaaccaagactccacaaaccagacttgaagtgatctgatgcaaattaaaaccacaacgacataccagaacacacccaccagaaaggctaaaattaaaaatattaacaacaatgacaatgaaaaggcaagctataagtggggcaggggaatatgcaaatcacttaccaacaatatatatagtcagagtatatttttaaaaactctcaaaactcaaaagtaagaaaacaatctaattcttacaaatgagcaaaagacgtgaacatttcaccaaagaagaaaagtggatggcaaacaagcacatgaaaagatgttcaatattatcaactgttagggaaatgatatttaaaaccatggtgagataccactgcacatctgttagaatggctagattaaataccgacaatgctaagcgcagacaaggatgtagaactggaactctcatacgaatgcaaaaatggtacagccactctggaaaatggtttggcaggattttaacacctttaatgagatataagttacatgccacaaaattcactcatttaaagtatataattcaatggtttttagtaaatttacagagttgtgcaaccatcacccccaaaagaaactgccagactgttttctaaagcaagcaaaccatttcacattcccaccagcagtgcgcgaaggttctgatttttccacatcccctccaacactgaccgtgtccttttaattgtaaccatcctagtaaggataaagtactatctcactttgagtttgttggcagtttctcataaagtgaatcagacaccttctccatgatcccagtaggggtcccatgggtgcaaacctatgcaaaaatgtatcactatgcatttaatattagcctactagatacactttgctgtatgtattctatactcatttttttaaaacaaaaagacaacaggagaagaaaaactaagagattcagggaaaattaagatgaatgaaataaggaatgcaaaaaaagaaaggaataaaataaaaagaaataatgtgtctggccagagagtgcctagtgagatcacagctactgctctcacaagagggcgagttcacgtctcctacctgttcactcacctctggcacccatttaactttaagtgtatggtggccgggcgcggtggctcatgccctaactccagcactttgggaggccaaggccggtggatcacttgagtccaggagttccagaccagcctggccaacatggcgaaaccctgtctctactaaaaaatgcaaaaaaaatttagcaggatgtggtggcaagcacctgtaatcacagctacctgggaggctgaggcacaagaatcacttgaacctgggaaggagaggttgcagtgagccgagatagcaccactgcactccagccggggtgacagagtgagactctgtatacaagaaaaaaaaatagtatatagtaagtaaatgaagtaatttaaggtgaaggttccttagaatcccacgtctttcccctgtctagtgtagaaactgctgtttgcccaccttcttttccctcctgcctcagaaacaaaaccttgctttttgtcagtattcttgttaaacagctacatttcccagcctctttgcaagccaggtgtggtcatgtggtcatttgcccaagatgtcagcacaagcaatgtgtgggaactctgggaagtctccctcaaaggacagggctccctctctttgctccttcctactggccggacttcaggcatgaaggcgggacctccagcagccaccctggataaggaggataagggcagcagccttaggatgggccagtgcagagctgaagaagccttggtttcccagtgacaatccaggccagcatacctctcctgaacctcctaaccccagcctcctctgatgtgagacagaaagcactttatatcttatttaaactaggtcgtttgagagttttctgctataacagatgttttttctcacagatacatcctctgtcaaaattcaaccacaaaattcaatcattttaggtgctatgtgggcctgggtcaacctcaccctctctcggtgttgtttttctcatctacaaaatggagataatgacacctgcctcacgaaattgtgaggtctaggtgggaaagtactttgcaggtgtaaaaagccatcaaaaggcaagagtcattttgttcagtcaggttcctgaatcttccagaatgcacttttttttttttttttttttttttgagacagagtctcgctctgtcgccaggctggagtgcagtggcataatcttgactcactgcaacgtccacctcccgggttcaagcaattcccctgcctccgcctcccgagtagctgggactacaggcaagtgccaccacatccagctaatttttttgtattttagtagagacagggtttcaccatgttggccaggatggtctcgatctcctgacccatgatccgcccgcctcggcctcccaaagtgctgggattacaggcacaagccaccgcgcccagcccagaatccactcttaaaactcaagaacttagtgccaatgaactgtacacttaaaaaattgttgaaatgctgggcgcggtgactcacgcctgtaatcccagcgctttgggaggccgaagcgagcagatcacctgaggtcaggaattccagaccagcctggccaacatggtgaaatcccatctctactaaaagtacaaaaattagccaggtgtggtggcgcatgcctgtagtcccagctacttgggagtctgaggcaggagaatcgcttgaacccaggaggcagaggttgcagtgagccgggatcgcaccactgcactccagcctgggcgacacagccagactccgtctcaaaaaccaaaacaaacaaacaaacaaaaaatagttgaaatggcctgtaatcctagcactttaggaggccagggtgagagcatcacttgaggtcaggagttcaagaccagcctaggcaacatagcaagaccccatctctacaaaaaaaaaaaaattaaaaaattagccaggcacagtggcttgggcctgtagtcccagttactcagggtcctgaggcaggaagatcacttaagcccaggagttcaaggttacagtgagctatgattgtgccactttactccagcctgggcaacagagcgagatctcatcacaaaaaaaaaataaagtttaaaataataaattgtatgctatgtatattttaccagaattatttttaaaaccaactcaaatgtcacaaaggtttactgagccctaaccatgggccagacgcctggcttgctaaggataagccagttcctctcaagctgcacctctggatcctatgagcagaagccaatagtgaagccccgccgccgcccatccacatgggcaccagccacctcctccccctcaattatctcatgccttgtgtgtttttttttttttaattgaattttaagttctgggatacatgtgcaggacgtgcaagtttgtttcataagtaaacgtgtgccatggtggtttgctgcacctatcaaccaatcacctaggtattaagccccgcataccttagctatatttttttaacacaagtaaattctgctttctattatattaataagtttgttttaatgtaaaaagagaagtttttaatgattggccaattctatgactttcattctcccttccagatccctgaggaaatggattcttgaggagtccctttgccttctcctttgtctgtatgtcccctgccccatgacaggtacattctccagtcagggatgcccaggccagcccagcatactggaggcaggttcacctccaactgagaaccacggctggggccacaggaccctgggcaagtttgcaaatccatgaaaggtgcacagagagattcaaggtcgaggccaggtgcagtggctcacacctgtaatcccagcactttgggaggccgaggcaggtggatcacctgaggtcaggcaatcgagaccagcctggccaacatggtgaaacctcatctctactaagtatacaaaaattagccagatatgctggcacacacctgtagttccacctatttgggaggctgaggcacaagaatctcttaaccccgggaggcagaggttgcagtgagccaagatctcgctactgcacaccagcctgggcatctggactacagagtgagactctgtctcaaaaaaaaaaaaaaaaaaaaagattcaaggttggacattgcctctgcccccaaactttgaaatcttctaagaactctagccagccaggtgactgcagtgtttgggggaaacagtagcataaacccattctgatgaagggcttttgagcttggtggagaccaggcctccctccatcagcagcagcctcgagtgataatgacagctactgtttctatatctgcactgcttccaatgccatcagcctcatggctgatcctcacaaatggggttcctgctcccaaaaacaggcaaggaatgggaggtcagaatttaaggaattggccccatctcactcaccagtaagtggggaaactggtgttcaaaccaagtctgtgtccgtcccagctaggtccaggccacattgtccccaactccagcacagccccctgaaatggctctgattcatttccactcccaacccgctcagggcccagaagaaaggtagtgctttctcttggggtcttccccaagcgtgagcagaccattttagagcaaaagcctccacgtctgcataagcctggctctcagattttttctggcctgattttcactaattctgttggtgatgagctgcctaataaaattatgctaagttatgtgcataaagagtagcatcttaaactctaattattggccacatctttgaagaattcctgtgcaatttccagggtaatcaactcacctctttctttcggcctgattagctgtttgggccaatttaagcccccacccccagccccactcgaatcaacggggttctggatgtcattagctactccaattgcctttttaaaaatctgtttcatataaaaggacaaatgagaatgaatatttggccatctttaagacactaactacattcttttccacagcctgttctcgtttattctttctttcttccggaggaatttgaacacagcctgggctcccgcagttcatgactgcaaaaggcttcgccttcgaaatctgacccaagtgggcatattcgggaaatgtggcagcttcgaagaacatgagccagttaagttttctctacctattcttcctccgcactcacctcccagttctaggcagctggtttatgcagcctgctttccaggactgtcgaaggaaaaggcacctctgccaaaagcaccccaggctacagggctgaacagagacccatcgtatcattcgctggaaaagcaagaggaaacttcatccaaggactggcttcttctctcctttatttactagtgtggttatgtcaataaagtcatgcagaaccactgggcatgggagtgggttggttccaatggaaagggttgcacctgagcctcctcggacatagacgcagaaatgagaacaggtgggaaagggtcggtgaggcggggtagaagagaaggagtgaaaggggccctcgaacatggttcagtgtagagggctaactttaataatgcttgctcgttctgcaacggactctttagtccgaatgccaaggtctgcaggccctccctatctccctgacctcacctcctccatgccccaccccctcggtctcagcactccagccctgtgcccctccgacatgcccagcctttcctaccccggggcctttgcacacactgcaaccacaatgtcacttccccagatctctctgaatgacgctctgcctttgcaaacttgcccagggtcctgtggccttagccattgttcaaagttagaaatgaacctccccccagtatgctaggctggcctgggcatccctgactagagaacatacccctcatggggcagcccaaggagaaagcaaagggactcctcaagaatccattgactggctgggcacggtggctcatgcctgtaattccaacacttcgggaggccaaggcaggcagatcacttgagatcaggagtttgagaccagcctggccaacatggtgaaaccccgcctctactaaaaataccaaaattagccaggtgtggtggcacgtgcctgtaatcccagctactcgggaggttgaagcaggagaattgcttgaacctgggaggcagaggttgcagtgacccaagatcgtgccactgcactccagcctgggtgacaatgcaagactctgtctcaaaaaaaaaaaaaaaaaaaagaatccatttacttggggatcttggagaatagaattggccaatcattaaaaacttttttttttacattaaatccactaatggaatagaaagcagaatttccttgagattaaaaaaaaaaaccccacaaggcatgagaaaattgagggggacggtgtggctggcacccacatggataggttggggggcatcactaccagcttctgctcttacagggtccagaggtgcacagcaccctccttctcatcctgcagccctctgctccagtgggcccatctctgactcccagcactttccccacctttattcctacctggttgtcatcctctgcctaacccttaggctgctttatcttaggaagctttctctccacctgatgttagtcttaatctgtttattgtctttcacacacatacacacacacacacacagagtgtaatcactatgagggcagacactacgcttgtctggttccctgccacgcctccagccccaagaacagtgcctaacacataggaagtgctcagcaaatatttgatcaatgaaggaataaaaatgtcagcatattctgcacatctcctacccatcccccaacactttttccattccttctggactctgcaatctttctcaaaggaaataaaaaatagtcctgggcttatctggacctgatctgatcaaagaaaaaaaatgtatttcttttaaatctcttgaaaacaaacaccacaggcttagaacaccaagttcttaatgtaagcaaacagaacctgctggctgaattctaagaaatgagccctggcttggtatcaagcataggttgtggggccgatgacttcacatgtgactcagttaccccaaatttcagggggaatccatttcaaaatcaaaacgtcaacatggaaagtggagggtggctttgtttgggcattcctgcaagaaggcaggctttctgaaaagatgctatgttatagataactcatccacaaaaggggggcaggagggatggggagaaaccccaggattgggtgtatttctcggctaaggctttggatgcaaactgatccgggaatgcgtgatcctccaaaaatccaccagcccccaaagtgcttgagttacccctccgaccacagccacatggaaaatgaaattaaatcccacggaaagatttgacttttttaacattatgcaatgtttgggtgaaaaaaggggggtggggagagggagatcagaaaaaaattcatctttttcccagagtttagcagagctatttctagcttttaatgatacatttcaccatcacttcatgggtagttttgagaggcgcgaaggcgggaccggttctgttatgtaacccatttaaagtaggaaattagcaagtcctgaatgaattctgtcactgtgctcccacttctggaaaatttggagcgactacagttctattttgaggtgagcaaatccatcatttatagacctcctcacaaataccacagggcttcatgtcaccctgaaaagtttcataacaaaaacactaaaagtacttggggtgttggtacatttcgtctcaaaaccttattagactgaacagtgaattggcaaagcttcctacttgccaattattcaaaaatgcaaatatccaagagcaaataaatattcatctctcaccctccctgccttttttttttccttttttttttttttaactaagtccagcaaaatattctggtcaacaacatgaaaagaaatgtctgtttttcacggagcctctggccatgaaataaattctgaagctatgaaagcacagtcttgaaactcagggcagttgggcacgtggggtccggctggttgtggaaaacaggaaacagcaatgtctttcagtcctcaagttccccctagcggctccggcggaggagtgtccgcacatggacggaagttcactgcaggcaaatgcagaggcttaaggtcgtgcagggatagcacacgtttaagggaaagcatggtcggtccctacctttgaaaccacataccttccttttgctgctgtcatgagataacacaactaagttacaattatctttctaatctatatactgaggatggccctttccattgagaaccaaaaagagggaaccagcagctcacactgcagacagccactaattacaccatttggtatagtatttggtatagtaggcggaggcataacttgcttcctgagacacacgagcttatacctccgggcccttttacaaatacagacagacaaatggtacagctgacacgtgccaattaaattagggtttctctggctgggcgtatgggctcatgcctgtaatcccagcactttgggaggctgaggcaggcagatcacctgaggcctggagttcgagaccagcctggccaacatggtgaaaccccgtctctactaaagatacaaaacttaaccgggcgtggtggcaggcccagctactcagaaggctgaggcaggagaatcgcctgaacctgggaggcggaggttgcagtgagccaagattgcaccactgcattgcagcctagataacagggcaagactccacctcgaaaaaaaataattagggtttctcaatgttggcacttttgacactttgggctctgttgtgggggccaccctgtgaatcacagggtgttcggcagcatctcttgcttgtagcactcctcttccccgagttgtaacaactgaaaaggtcttcataccgccacgtgtcccccaagggacaaaaatcacccaattgatttcaactacttcctacacaaaagctttttttgttttgttttgttttgagacggagtcttgctctgttgcccaggcaggagtgcagtggcacaatcacgactcactgcagcctcgacctccgaggctcaggtgattgttccgcctcagcttcccaagtcgctgggaccacaggcttgagccagtacacccagctcgttttcttgtattttttgtacatgagtttcaccacgttacccaggctggtctcaaactctgggctcaagcaatcctcctgccttggtctcccaaagctgggattacagacatgagccactgcgccgggccttaaaaattttttctgcctaaaacttaactgactgttcctatatgttccatccctcgataaaaaaaaaaaaaaaagattccagtcatcgaggaccgtgtatagaaatacaatatgaagcttatggttttcatcttattttccatttatatctatcaccttttgaaattctgacacgtctgggatggacaatagtacaaaataataaataacatgcattgatttggggttttttttgccaaaatcaaaataattttctgaactggaaagagttttctttacatttcatgtaccatgaaataaagaaaaaataggagcgttataataaaaagtcctcattttgataccagaattcatgtttctgtacaaattaaaataatcccccaaggcagaacgtacacaagctttattgggcaacagcaacgagccacgctggcaaacaatgaaagtagagtcgctcagaaacacgaaagatcatatgtgtgtcatcacagcatcgagaatttaaatcatctggaagttcctgctaaattaaagcatactgtgccagagctcccctctaatcaaaaaacgctgtcctggtgaaaatttgcaatgaggattacagagagagagatcaaccaatgaggaaatcacagactcttacatgagtttacagttaaccccactgcaacaaaataataaattagccataatttgttttttttgcaaataccatgccccccacctgaccccacaaacacaacagtcactgacatggcccagctatattaacagactgcgcctcaaaccatgctgtggcggagaagacagattcacgggtaatgccgctttggcctgagaagatgcttcggagctccaggtggaggagctgctcacgctgcaggatgctttgcaggttcattcaaaaccaaatttttttccaagaagaactggacataattcatgggaatattttaagtatatataagtggcaaaaaagctgtacattaaaagaagggggagaaataaaatgtgttgtatttacaaagctctttgtatatttttttaaatgaaaacaaagctgggagtgatagaattttaatgcaatgaaaaccaaataattcttcaaaaaactttagatgacatcattctctcgctctttcacacacacacacaccccccacacacttcaaacatacagaaaaggttaaagataaaaatagctgataggtgtttaagtaggatggagcagaagaatgtacatgtcccatttgcaattttggcaaaggtttaaaatgctgccctaaaggcacgcacgcatgcccagcctaccccagtaaaaacaagacaaagtataaaaagaaaagtctggcggggggtgggggaggcattagcatatcaatttccaatgagcacaaaattcaaaatacattaaaaagtagcatggcttacattttcagcagagaagaaactgaggaaatgttcataaagagacaatgatttttaagatttactgtcacaaaaaaaaaagggtttcacttcaggggagtggaactgggatgggaattttacaatgctagttccagcacgtggtctaatggccccaggggctggaaaagggaggtctgctccaactttaagatgcgcccttgggatgccttccaagcagctggagttagtgccacctgtctcacctggcaccacaggcaacacacatgtgcacacgcatgctttcaaaatgaggatcaaaactgtcccacataagaaattactcaagatggaaaaactagtctggtgattttcttagagaaaaaaaaagagagacaaaaaggaaggggtggggggaggggaagaaaccaaatagatcctgcttccccctgtcacacaaccatcatcaaaagacatatgaacaataataaaatagtaatagaagttcttactctggcagaaatagctagtgttgtcagagggcgcagggagctgtgagttttgctttcaggaaaagtgttcaaacagtgctgactgtgtacctcaaggccctctgacctcaaattaaattggctgtcaaagacttacggcccatggagctcccaggtgacagtgtcaatggcgctttatgtaagttctttccagattgatgaaccaagaaaaaggtcaactgaatccttatgcttaaggtttacaaactcaggagagtttcttgtatagtaactctagtttcttgtttgcttatttctttgtcttccccaccacaactaagatgacctccgagaagtacccaggcgcccctggggttctctgctgggcttacagtctgattgtgcaggtaaagatcgtgtcctctcaccggactgcatcctcctgcctttgcgtctccagtgtctgagaagcacggtgtgtgcattcctaggtgttcagggaccgtccagtgaatggcgtcagccagctgcccactgatgggatgggccaacgacgtggcagtttgcacttgagtgtcggtacttctcacccttgaccgcctccgccccagtgcggctgagacaacagagtaaaaaggtttgtggagaacactgacgagtaccttccacttccaactatggcttcttcagcccctcctgggagcattctcccttgaagatgtcaatcagtatcttaagcgttggctttaaaagtcaacttgtgcacctcaatcaaaattgagaattaaggaaaaggccagggagaccatcttcattctgcttctgctggaaacctctaaaactttctgacgaggctcccacacgccctgcctgcaggagccagcatcccgaatctccgagcaaagccaggtacagggtttgcaaagtctaaacaggactatcttaagacttcccagcgttacagagccaggttcagcatctgcaaagtctaaatgggactatcttaagacttgccagtgttacagactgatttccaagaaaacggaggcttaaaaacttccagcacaaatttctcctccacctttgaaaacacagaaactcactcaatgaatacgtcagatttgctcaatctttctgaaatttttggacaaagatcctatccttaactattcactcaatacatcttttctgccgaccttttccctctggcagaaatggctgaatcagatagagaaaagtactgcaaaactgcagaatcataagacaaaatagatgtggtgtcaacagccaattaaccagtacctgcaacgtaaagtcattctagaacattttaaaaggacaacacaaaatacaaaagcttatcaagagtgctccaaaggcaagggactatctgatcctcgtgtctccagctctccaagagcaggagttagtaggcatcagaaaccaggctgtgatgtacatctctgaagcacacagaagtagcgccaggcagagggtttgaaggatatgtattcatcaagaagtaaacgcaaatccaagatctcaaccacacttggctcttaaagatccaccaacttaacccttatggcatgcatatgtggcttctgcaagaagcaacttgaaaacccaagaatgccttgctctaccacgtcccgcgactgcaaactcccttcctctgaaacaagcagccacagctttataagaaacatgccggcatgtagtccatcctgggaggggagaaatcttcaccactggctgcctttcagcaagttccccttgaaatctgccggcagtggaacagatcccagatcccaacgctgtagcttgggcgtcctcccaccaggggttccttgttctgaaagctgccaccagtgttgttccgaaagatgcctctgcctttgtggggtcatcttccattatgcctcctaacaggaaacaggcttctatggaagagaagagtcccagccccctgacctttccgctttggtcttggaggatctgagtcacatctgccatgttgcctaaagaattagttgagtctcttatcacactgtcgacacatttaggggccattcagtggcacgtttcctgctaaaacaactctgctgaaaatgtctgaggtccttctcaaacagccactggctttgtgattgttaccaggtcccaataaagcgggatcacacctctgaaattcttttacgaggtggcaggtgaagttaactcacacactatggatgctgaatcagatcaaggataacagattggacttaggacactctctctccctctcctctcatttactggttacgatcccaggaatccagtgtaacctggataagcagggctggctggagacgatactgagcatttccgaatggagattattgtgtggataactttttaccaaatgtcactgtcttttcctcccaaaccgacaccaagagctttctatttttctgacacctctttgtaagagcaagaaagacataaagagtacatacacattaggactctttaaaaacacacacacacacacacacacacacacacacacacacaagccttctacaaccttcagctacacagaaacttttatcatgtgacaacaaaattcaagtcataaggaagctcgcacagtgacccatataaatctcccagctgagccaccagctttaacatattcatattcacctaaacatgaagaacgaggggttcagacaggcccagatgggtctctttcaggaccctccctcccgttgatgcagcgttaggactccgtttaggcgcagagccacttcccattaaaactgcatgtgttagcaattactgcaaaatccacaggtggcggttaatataaatggaacttgagctctgtccatcagggaagcgccaagaccagggccccctccagcgaacgcacggcctatgatgtgagctttgagtagctggggggagagaaccgtcttcgcaggtacttgaggacatagagggggaggcagctgaccagagtgatgacggagactttccacaagaatgacaaggtggcgatgaagtacacatctgcaaggaaaggggaagacggcagtgagcaggcaggaatattccggaaggtgcatggggtccagaaacaggcgtcacaactatcaaagggaaagtcatctcccgtcacaaacccacagcctcctggcattggccctctttctccatggactgtaagggaaggtaccatggctaagagcacacagcgccgcagcttgattttcctcgctctctcttctgtagcttcctgacagtgaaatgctacttttaacacccaggagaagaaaactatgggggccaccagatgcagtggctcatgccttaatcccagcactctgggaggccaaggcgggcagaagaattgaacccaggagtttgagaccagcttgggcaacacagcaaaaccctgtctctacaaaaaatacaaaaactagccaggcatggtggtacatgcctatagtcccagctgttcaggaggctgaggtgggaggatcatctgagcccggggagcttgagactgcagtgagccaacattgcaccaccgcactccaccctgggcaacagaataagacactgtctcaaaaaaaagagaaaaaaagaaggaaagaaaattacaggggaagaaaactcagagatgcttttgatttggtgttgtctaacagttggagagtctttctaagtcccggccactggcgagcagaaaatgacattcaaatgcaccctctgcttccagtgatggtcgcagaaagccacaggatgagtctgggtcatggtgcaaagtgttcagacccccttgtcagagaaaggcttaagctgaccctcagggactctgatggaaggtggggggggcgggcgtactgcctttcctgctgcaggattataaacccggttatgaggttttcttaagagaggagtgacagtttgtggctttcaatatagcagaagccagaataagccccttctccactttctgagcacaggatgctgaaatgcagctgccactgaggcagcacctactaagtgccaggcccaaggctcaactcaccctgtggttttcctacacctctgacccggtcctgtggtgtgtccctatcacaaacaagctgagcttcctgagcaggggccacatctctgtgaccacctcaggcccaagcctttgagcacatactaggtctcacaaaacgctttctagagactagtgacaagggtgaaactgctttaaaactccactgttcacagggatgctcctttagttcctggagcgcacagtaaatgctcacaaatcctttctagaaactggggctgcaactgtgaaacctttacttttcaggggatgtttcttttacctttactaaaaccttcctaaggagctttggaagctggcaaaagagccgcgatcaaagatgcttccagggtaaggtcgagtttctctgcctttttgttgttattgccccttaaggaacatttttagacttttcttcttctcctaattgaccacctccatgacatgttaatgtcacaggtatactgtgtatctgtttataatattatatatacatctcctttatacgtaaaaggttagggtttgttcacaccccaccaaagaccactgtttgttccccaggcggtggggtccacaccacccccactgagaaggcctgaggtaaaggagcaagggatgggccattgctagagagcctgggccctgcaggtttcccacggaggatggggcgtgagggggttgtcattaactgaaagtttcccccagagagagtctatcctgcaatcctgaacacacatgagcttcttagcagagaagcagcctccgggccctgctcccccagctgataaaggagaaacagtatcactcttgagggttttttgtttgaataacacagacagaaaattaaatgctcctactgaggaggaaagaggtgtaaagaggactgtctgctaaaccagctagactttcaggatgacccctggccctgaggttccaaagccatagcggcttgagtttgccccgtgcgggggaaaccaagattagagttcagaatctatccacagcacaacacagaaaatgctggatcatctgaaccgtgcccgtgttgcaagttctagttgaactagaaacaggtttctagacaggaattaaagcccgtgtcagcacccgatggggtccgtagcatagcatggggtcatcttggtggccctgcagggacttgtggctcaatcaattgggaagaaattaactgatatggcaaagcaagtgaggtcagcatggaagagtgatgaaaccaggcttgtccatctagagacagtggctgacgctggacaagcccaagagtacctggaatcactactgaggtcagagaaatctgccaccaccccacattaggatggtgctgacactcccccatctctacattcccataacattttttattatttatttatttatttatttatttagaaatggagtcttactctgtcgcccaggctagagtgcagtggcgtgatctcagctcactgcaaccttcgcctcccgggttcaggcgattcttctgcctcagccacccaagtagctgggactacaggtgtgtgccaccacgccctgctgatttttgtatttttagtagagatggggtttcaccatgttgaccagaccggtctcaaactcctgacctcgtgatccacccgcctctgcctcccaaaatgctgggattacaggtgtgagccattgtgcccggcctccataacattttttatttggggtgtgcctgggcgtctagcacctcaccccatttttctttcttggtaactttgatcacatctgatattcctgtgctcacactcacttaatgtgtgtttatcgtgtgttcccaacgagaagggcagctccctggcgagcccgtccacctcatctgccaccataatcctggcacacggcaggtgctcccacgtctacggaactggcgagtaccttcagcacttggtttgctgtgaggagcagcagattgtattctgagatccctggagtccctcaggagctctatcaggacacagcagcaaggcagggctgcacgggcaaggttctggggctcggcacctcccagcactgccactttgctatcacaagtccccttttatcagtttcatagattggacttcagattaagatttcatgggaacaaaaagattttgtggcccaaaaaaggtgacagagcaagactccgactcaaaaagaaaaacaaaaacactgtctactgcaatcacgccctctgtcctcaatttcacaccctgaggcacaactaccacctgtccctagagaacacctgttaagaaaacgtggacagctgagcgggaaggactgctggaggaagagcccaggccgagcgctgggaaccccccttccttcatacggcagtgagacctctgggccagattcactgggggtgacggacggggtttaagcattcaggggtcttaccgatgaactcgtgtaagaacaccagggaggcgatgtagcaggccaggctgagcagctccgccactgtcatgagccagtgccaggtctggatggtcagcgccaccatgagcagctcggtgaggatcagcgaggtgaaggagatggccacgatgtgcacgaactccgactcaaacagcagcagcgccccgtacatgatggtgctccctgcaaacaccagagaagggtattcccctcaccctccctgcgaaagccgtgcgctgctcgcctacacctggctcctttccgcagttttcatttagacatgaaaggcatcacttgttacatgaggttaatgactggtgctttatgcaggtctgaacctatggttttctgattttcctctttgaccttgtaggataaataatctttaactacaaagtgagaaaaagggagaaaaaaggaagtaaggcagggaggggagtatctagagttgatgaaagaaatagaaagttaaatataatatttaaaatgatggagtcgcggccaggcgcgggggctcaggcctgaaaacccacaatttgggaggccaaggtgggtggattgcttgagctcaggagtctgagaccagcttgggcaacaaggtgaaagcccgtctctacaaaaaatacaaaaattagccaggcatggtggcatgcacctgtagtcccagctactcaggaggctgaggtgggaggatcacttgagcctgggagatggaggttacagtgagctgagattgtaccactgcactccagcctgggtgacagagtgagcccctgtctcaaaaaaataaaaaataaaatgatgtcgtgactcacacctgtaatcagcactttgggaggctgaggcgggcggatcactggaggccaggagttcaagaccagactagccaccatggcgaaaccctgtctctactagaaatacaaaaattagctggacgtggaagcgcatgcctgtagtcccagctactcgggaggctgaggcacgagaatttcttaaacctgggaggtggaagttgcagtaagccgagatcgtgccactgcactccagcctgggtgatacagcaagactctgttacaaaaaaaaaaaaaagaataaaccccaataggagacatgaacagtaaatttattttttaaaaaaataataaaccccagccagtcgcggtggcttacgcctgtaatcccaacactttgggaggccaaggtgggcggatcacaaggtcaggagttcgagaccagcctggccaacatggtgaaacccccgcctctactaaaaatactaaaattaggtgggcgcctgtaatcccagttattcgggaggctgaggccggagaatcgcttgaaaccataaggcggaggttgcagtgagccaaaatggcgccactgcactccagcctggacaaaagagcaaaactccatctcagaatagtaataataataatccccaaatacacatgtttatttgtaagttatatatgtgtacctgtccagatatatagaaatattaggatcatttcacatgtatattatatgtactacaaaacatacataaaaatggaaatactaaaaaagagtgaggattccgggcacagtggctcatgcctgtaatcccaacactttgtgaggctgaggcaagagaattgcttgagtccaggagtttgagatcagcctgcacaacatggtgagacctcatctctacaaaaaatacaaaaattagccgggtgtggtggtgtacacctgtagtctaagatgctgaactagaaacaggtttctagacaggaattaaagcctgtgtcagcacccgacaggatccacagcacagcatgaggtcatcttgctggacctgcagggactcgtggctcacagtccattgggaagaaatgaactgatttggaaactgatttggtggtggtgtacacctgtggtcccagactcagaaggctgaggtagggggatcacctgagcctggggaggtcgaggctacggcgagccgtgattgctccactgaactccagcctgggcaacagagtgagaccctccgccacccagggtctcactctgtttctacatattatataaaatatattttataagtatataaaatctattatgtgcactacaaaacatacataaaaatagaaatactaaaaaaggattctgggcatggtggctttgccctgtgtctcaaaaatatataaataaataaatatatatatgtaaatttaaaagagttaggaaaaataaatacaaacagaagttttgctattttcttcttatattccaacaggtcatcttacaacgcctccacagtctgggaagacccccctctggaggccactgaggtaaacatgtttttccaaaactacgacttgacctgactctcagaaaaggtttcagaacatcccagaaagcatctgctttttgcctcatgagtggagcagccccacaggctttgattactgtccactgccttcctctggcttcactacctcatttctcacacagcagcactgtgcatgtctgatgttcaagtccttatacagggtgagcagggtctcccctgggtcccactgccaccctccttcctgctatttcagattcgtttcttctcttcttgttctacaggcaagaaggggacaccctgagtcagtaccagagcacaagacaaacaggtgtctccactcatccttaccttgatagatgctaatcaaaacccatattaagaatgtcttgtaggacaacggccgtccctgaatgagagacagagaaaggttagagccggtttcgcggggggctcacgcagcatgccatcagctttcacgttattctcccgctaacgagataaggcaacccatctgtcttcatcaataaagtggctcgcacacatctgaacacattggaggaattatttctttaaaaaaagaattggccaggcatggtggctcacacctgtaatcccagcactttggaaggctgaggcaagtggatcacttgaggtcaggagtttgagaccagcctggccaacatggtgaaacctcctctttactaaaaatacaaaaattagccaggcatggtggtgcacgcctgtaatcccagctactcgggaggctgaagcaggagaatcgcttgaacccaggaggtggatgttgtagtgagccgagatcgagccactacactccagcgtgggtgacaaagtgagaattagtctcaaaaaaaaaaaaaaaaagaattaacattaaaattaacattacatgggaataaaccttcccttgggtaaaaaaccctgaagacaaataaaattatacacctgcctaggcacacgccaccacacacactttttggaactgtacacaagaacatctctgggagcaaacgttaagttgcaactgcaaagcggaactgtcaggggctttttgcaagtcgtgagttggcttgttttcagtttatctattactgtactttttcacgttctttataccagtgaatatattactgctttaagaaaaaatgtaaactcccacaccttccccccaaaagtaaaaaagctaccagttcaagtgtgttcaaatcagaattggagggtctgtgtgaaataaattcaaagaaaaaaagcagggagggagggaaggaagggaaaagcaaaggaggaaaggaggaaggagggactgaaaagctaacagaaccttgagaagatccttgtagagctcaggatacagcatggcaacttccgatttgacatctttgtccaggaccagagaaaacacaggaaacatggtgtaaattgtggagtacctgggagagaaaaccgccataggtaagacctggctgacgcgataggagctatgtgctgtgccagcctccggcacccaagtcccaaccatgcctctaacaaatatttactgcttgtctattatgctccggggctggctgtaagcaccagaaacccatgagcaaaaatggacaaaaatgtctgccctgaagagctttcatcccggtcagcgagtcaataaacaaataaattaggtaaactctatgtgtgttagagaagtgctaaagagaaaaatataatggggtagaggaaataagacgtgtgtgtgtgtgtgtgtgtgtgtgtgtgtgtagggggtgatggtacaattttagaggctgaggaacagaacatttgagtgaacacccacaaaaggtgagggccagccaagccaatcccaggaggaagagcattccagggagaaggaaccaccagtgcaaaggcactgaggcgggagtggctgtcatgtctgaagaacagccataaggccagtggggctggggctgagggcgacggaagaggaaatgaggacccacgggaaagatgggaccagaccacggaaggtcgcacggcgcacagctcagggaacccctgactatattctgtaatgttcttgtactcttccagaacccgacgaaagacagcccgcttttccagttagaagcaggcagaattctagtgcctcctctcaggctgaactcatcagccaacacagtaggatggaaagcggactctgtgagactctccagagcgcagctgaccttcccgcacccgccgtctcctcataaccagaagtggcctcagctgcatgtgtctgtatctagggcactcggtaaccaaactccacctacctgggtgattcagagactgagcacattctctgaaaaggtcagaaggatcatcctgaagttccaggtcagtaatgggggtgggtttgcaggctgcaaaggcccaagtgacaccatctctgtcactgtggcacagcagccaagctctgttacttgcacatccccgaggcagtggactctggccctccctggagctccaaggatgggacttctactgggctcagttcaggccaggagggcatttttcagatcccccacccctttttattaagaccccagtgaaatcaccaagtctgcaaaccttccaccttgctctcctcaatcaactgataactctggagtattttttcaagaccaggtacaaatggcaaagtgcaacacaccacacacatctccaactccacttcctccatctggttaagggcttaacagctcaaaaccttgttaattgaaggaggttctaaaccatggtgctgggcctgcattcgctggggctgggaatccaatgtggcttgggaacccaagaatttttccaccacgtttcttctctctgttgcagcatttgaagaaggttttgtaaacaattaattccttggcaggatttccttacccaatgatgaggaatccttgatagagagggacggaggcaaagtaaaacacggaggaaaagacagcctgtgccaaggagagaggaggatgtcaccaaaagtcatgacaaaatcccttacatttacagaataaaaataacacctgatacttacataacacccgcgccggcactgctgtaaggtactttacatggatttgctcatttcattctcacaacatcaacaacaaccctatgaagtaggtacgattctcatcatcctcattatgcaaagcagaaagtgaggcatagagagggtacgtggcttgcccaagcccacacagttcctaagcagcaaatctaggaatcattcccgggtagggtgatgtatcacagctccagggtctactcagcctgttgtgaatatttattaagttccaggacccaggaatgctttgtacatgagcacagctgatctccagagcagcccacaggatcaagccctactatcacccacactttacagaaggggaggctgagcaggtaaacagccctatgggactcaagcccagctgtggccacagctctgtggccacacttctaaacagctcggaatcctcacctctgtaggcatgcacgctgctaaccaaagtgccgtaggtatggaaacacatacagaaaaagagcctctgaagtgtctacgggggctgggatggcagaaaaggcttcacttcttatattacatgtttcggtatttggggaaatttttgaaaagagcatggtgacagattatttttgcaattagacaaaagcaatgaagatatttacaaaccctcgcggaaatgtctgcttcctgctttggaaaatattagctgctggtaatgatgaataggctggggagatccaatcaggcttgaagctctgttagctccatctctggacctctatgggctaacagaggaaacacggtctccaagctgatatccattcatataaagctgaaggaaggccagagacaaatgctgcctgaaagcttttagaaagcagaagaaagcaaggcagagataccctagtcattagaaatagcatcagaccagggctagctccccagagcaccttcaatggacacagagagaaagcatgtaagaaacacgtgctttctcggcacagagctcagagcgcaggtgatcctgagcgccatggccacaggaagccccagttcgccctggctgcgccggaaaagccacttttccagtgacttttcacccaggctgtgccgctgcttaggaaggatggttgtaaaaatgtcaagaatctgttgtttattttccagaccagtatcaggagccccttcctctaaaagggtcatcctaaccacaaagtcttcatctcgacaagagcactttgggaaaaataaaaacactgtgttctctgacagactcatgtcccggtgcaattctaactgggacttgctctcggccattttcagcacagtggacaggggttaaaggcattttctttagcacaaagaacaatgcctcatcctggaattctttttctacatcaatgttaacagtaacatccagtttttgaagaagtcagctcatcccggccagcttttgtgtatgagtccaaggacgggctgattaatctcccaatcattaaagccacagcattatcctgttcaattggtgagttaacataaaagtacagatgtggtctggtgaaccacagcagctgtttgggtttagatcattttgatgaaagtcactttcaggctcccctactcacaattgcaatagatatttaaaacataaaatcacccccaaaaaactggggtgtagccagtggacggaaaattctcatgtacccaaagcagcactacctgatacattgtacaaggcagaccgcctttcaagtatgattaaacattctcacaaattaaaatatcacctgatgtttacatattaccttatttcacttctactaatcacggtaaggatgccttagcactgatgccttaaaaacgtctctgtttttcacagtggccctgtccgagggcaaggagggtctcatcatccccgttttccaggtgggaagaccgaggcctagagtagtaaagttatttgctcaaggtctcacagatccttaatggtatggccagaaggagacgtgagttccaggatctactgtacctacattctcaccactcaactgggagcattttcacctcaatgcccaaaaaggaagattgacaatcaatagctttttaataccaaaaatattttctttccctcctttggcctcctttctactccacacttaattgctacagactgatggcaaattttgttgttgttgtttttgagatggagtctcactctgttgcccaggctggagtgcagtggcgcaatctcagctcactgcaacctccacttcccagattcaagtgattctcgtgccttagcctcccaagtagctgggattataggtgcatgccaccatgtccagctaatttttgtatttttagtagagacaggatttcaccacgttcaccagactggtcttgaactcctggcctgaggcgatctgcccacctcggcctcccaatgtgctgggattacaggcatgagccactgcgcctggcctatgatgacagattttgaagaagtttgtgagagagaaggtgagaaaatatatactctagaatccttttatgaaaaagcaagatgggaacaagatgttaacttccaagggtattcgtgatcataataattaaactcagttcccctactaggctctgctggaagacagaaccgtgatgctgagtcaatctcagtgccaagtgtcatgctgacccctgcaagtggacacggtcccaggccctccatgacgagtgtatcaagaaggtactcagattgtgactgcaggctttgaggtccacctgcctgagctgactgaatccctgcgggacaccacaaatttctcatccatattcagcctcagcctccccatccgtaaaatgggctcaggctattgtgaggcttatgtgagacactgcattgtcaacacttagcctgatgcctaaggtacaggaggcacacaagcaaagtacattcttctttagtggttgttctctgatggcccttacctctgcaaaaggtgaaaaaccagggcctgaatagtcattcagcatttaactctgcgtctttcactccagcaaacaaattataacaacgtacccacaattaaaataactcatgtacactccacttgccccatgccaggcactggatgtcaccactgctaacgcacacatcctcaccacatggcaggaatgaccagcaccgcttaacaggggaggaatcttgagcaccaagaagttcagggactggctcaaggtctatcagctggaatgcagccaggtgggggatttaaactggcgaggtaggggtgacagctccaaagcataatctaattcccaggctttttccatgataattacatagccacatgtacatgtgcagagggagcagctgcccacccacctacatggtatagccacaggcacatgtgcagaggggccagctgtccactcacctgcatggtgctgatacagaggctcctgtgaatcacgaactggctgagggcggctgaccgcttgtagctgttccggccatgcaccataagcaaccggccaagatgcttaaattgagtgatggagaagtctgcagccaacgaagcctgttttccttcctaaaatccaataaaattaggcaccatcagaagcacaagaggtcagggcaaacacattttctttcactgaaaaagcaagacattgtaggaaatctttgaagaacttcaagaaagaaattctttggtttcaagctatatgcagttggtggtccaagtctaaatttgattttaaaaggggaatttatttaaataaaaaccattccgaatcacatatagttataatttggacgtcaagtggatctaatactttgggagttcagcccaccccataagtagcaaagaatcatttaaaaatagatattttaaaacattcagttcccttaagagctaattaaacaagaggcaaaaacccagagctactaacaatattagataggatattcctgaatacacagctctgcacactcacagaagtgggaataacttgcagtgcaaccatataatggaattctctcattttgtattttttaatttttattttttcttgagactgggtcccactctgtcacgcaggctggagtacagtggtgtgatcttggcttacagcaacttctgcctcccaggttcaagccatcctcccacctcagcctcctgagcagctgggagcacagacatgcaccaccacacctgactaatttagttatttttggtagagatggggtttctccatgttgccgagtttggtctcaaactcctgagctcaagccatccgcccacctcagcctcccaaagtgctgggattccaggcatgagcagctgcacctggccgaattctctcattttaaaaggcagtgacagccagcaataaagggacagagggacatgagagcctctggatacgacacaacaggaagaacaccaattccccttgtacagtgctcatgccaaaccagaattggaaccgaatcaatctgatgggttcaagaactgtgtgccgtgagacactacaactgtcctgaatgcttcaaaaatgtcactgacatgaaaaacaaaacacccgctaaccaaaccaaacaaaaagagagaaacgtgttctacaataaagaagatcagaaacatgaggacatgctaataaatgtgatttgcaatccttcctggagcttttattacttaagctgtgaagacactcagaggacagatgggggaatttgagcatgaatattatccagtaccattatatatcaatgttaacacggggttgagcatgaatattatatagtagcattgtatcgatgttacatggggtgggggtgcctgggggggcggggcggggggtggggcgtggttatgatgttactttctttgtgtgggagaatgtccttgttctaaagagatccagctgaaatatttaggggtaacattacatacaatttactttctactgattcaaagaaagaaagataatgtagcaaatagtaacaattggccaaagtgaagggtagatgaatgctcactgttctatttcaacttttccattgttgtatttcaacttttgacatttttcaaaataaaaaggtagagtcagagtaagaagtgatggctctgtatgctctcatgtaggaacaaatccatgatgtagcagatttaagtaagctgcacaacaaaatgtacagtgtgttttcaatttaaaaaaatacatgaaaattacatatatatacatgtgtaagatatttgtatagatagcaaatatatacacactcataaccagtaatatacacacagaaaaaatgttgagagaataaccagtgttactcatttgatgcagttacctaaaagaaaagatgcgttttacttctagattcttttattttatgttatatatatttttgagacagtctcactctgtcacccagagtgcagtggcacaatctccgctcactgcaacctctgcctcccgggttcaagcaattctcctgcctcagcctcccgagtagctagaattacaggcacccactgccatgcctggctaatttttgtatttttagtagagacggggtctcaccatgttggccaggctggtcttgaactcctgacctcaggtaatctgcccacctcggcctcccaatgtgctgggaatacaggtgtgagccactgaacctggcctagattcttttaattttttatagtgagcactattttatatcccaagaaacaaaggaaccagaataccatttttaatagaagggaaaatgctttaattttttaagaactggtagagaatgccattaaactcaaaaacatgcttcttaaaaactgtattcagggaatctatacagacttctgatatatctcattcaaaaatcatttcactctacaactttaaatcatcgtcatcttgctgagaaccagagaaccagaaagggtggtaaagagggggaaaaaaagccctatgggtcagccaaagtcatgaagctatgcaacaggatggacaggggagcatctctgctgccccctccgggccttggcactcctatacttcaaacacacttcttttctttttttttgagatggagttttgctctttcacctaggcaagagtacagtggctcaatctcgattcactgcaacctccacctcctgggttcaagtgattctcctgcctcagcctcctgagtagctgggattacaggcatgtgccaccacatctcactaatttttgtatttttagtagagacggggtttcaccatgtttgccaggctggtctcgaactcctgagctcaagtgatcctcccgcctcagcctcccaaactgctgggattacaggcgtgagccaccgcttccagcccttcacacacagtcctaacaaactcggtgacccatcttcttgcctcttgtcatttagaggtcacaaattagggccgagtaaactgtaagaggcaagcgcacaattggcaaggagaaaaagacagaaaaaatatttcctaacacaccaacttttaaaaattatacctgccaaggccttttggtgagaagtgaactaagccacactcttccatagcgcccaagagatcagcacagagcaggataactaatgcttttactgacaacgctgactgtcccagagaagtctgaagtatacttaccataccctaagaatatagagaaactttttttttttttttttttgagacagagtcttgttctgttgcccaggctggagtgcagtggcgcaatctcggcttactgcaacctctgcctcccgggttcaggcgattctcctatctcagcctcccaagtagctgtgattacaggcacccaccaccatgcccagctaatttttgtattttcagtagagacagggtttctctaagttggccaggctggcctcaaactcctgacctcaagtgatgatccacccacctcagcctcccaaagtgctgggattacaggcgtgagccaccacaccgggcctagaaacactttttctttttttaaattcaggtcgtggcaaacaaaaagccaacattcatctgtctgtaagatgtagcaatacagacctctatcttcccagtgacacaaggtaactgtgacacatgattccttatgttttatcattctttatctggaatttccagaaggcttaaagctgtgtctttgagggaaaaagaaccaagaaactacagcaagtggagccgagcagagggaaacactctcacctttccttccactcccacgccgcagtcagattcctgaatcatgctgacgtcattgcctccgtcccctgcgagccacacagaccagagagaaaagatgtttcattcttaccttaaccaagaatgtatgcttgtctttaccgcactctcgtctttcacggagcgcttgctgagtgcctggcctgccccgtccattccatctctccaaccccttgactaccaagatcctgtttcacaggcagagtggctgagtgtcagagagcccaggcggcttgccaagggtcccggcactgagcagcagcagtgggactgtgtccacataggcatttaccaccacctgtcctcctcggaggccgggataccccaggattaccatcagcagcaacttgtagtgctcttactggacgctttccatgcagcgtggcaagcacattttaaaggtgatcctttttaggctgagcagtggctcacgactataatctcagcactttaggaggctgaggcaggcagatcacctgaggtcaggagttcgagaccagcctggccaacatggagaaaccccgtttctactaaaaatacaaaaattagccacacgtggtggtgcacgcctgcagtcccagcaactcgggaggctgaggcaggagaatcacttgaacccgggagacggaggttgcaatgagctgagattgtgtcattgcactcccgctgggcaacagagtgtgactccgtcttaaaaaaaaaaaaaaaggtgaccccttttagtcttcatgacaccatttaaggaagccacaattattattcccattctaccataagcaaaccgaggctcagatgggtgaaagaagccacctggggcacccactggcaaaggccagtggaaagatttgaacccagatccaaccccacagtgtgtggtctccaccccctggaaggctgcactcttgagccactggcaaaggagtagaggcctggcacgtgcttatctactctccaagggaaatattaaaaataataacaaaaagagccaaagtctgagaggtggagaaaaatcatgacctgaacaaaggggcctggggaatttgaagaaagagcagcagtgtccaaatatccttagggaaagggagcctggtgcaccggcaggccagggccagcagcacagcctgagcctcgcctacctactgcacaggtgagcttgcccgtgcgctcctgaagcaggcgcacgatctgggccttctgggtgggggcacatcggcagcagactacggccgggcactggcaggccagctccatgaactcgtactcatagtacttgaggcaaacctgcagggtggagggagaggtggtgcgttggtggagggagaggtggtgcgttggtggaggtcgctgccgagcctgcagtgcccctgccgaagccgggtaagacccaggctgctgggaggactggctctcaggggtccccaagctcacctccagggagtctcccgagatgaccagggcacaatcatgcttcctgcggaaggcgttcagctcgaggtgagcctccccgcggttggtcacctggaagggaacagagatggggaaggaggcattgctctccggacatgatagaacaacaaacagtggcttccaggagcccacatgaagacaacggccaccccagccaagggtccctcccctcccctgccaccagaggcagcaccaaatggaatcctattggttgactctgcaggaatcaagagagcccatgtgccaaccaccacctacaatttcccccaggactaaaaatgcctgtactggccaagcgcagtggctcatgcctgtaatcccagcactttgggaggctgaggcgggcagatcacttgaagtcaggagtttgagaccagccttgccaacatggtgaaacccactctctactaaaaatagaaaattagctgggcatggtggtgggtgcctgtaattctagctacttgggaggctgaggcaggagaatcacttgaacccaggaggcagaggctgcagtgagccgagatcatgccactgcactggcagtatgggcaacagagcaagactcgtcttttaaaaaaaaaaaaggggggggggggccaggtacggtggctcacacctgtaatctcagcaccttgggaggctgaggtgggcggatcacctgaggtcaggagttcaagaccagcctgacccacatggagaaaccccatctctactaaaaatacaaaattagccgggcttggtggcacatgcctataatcccagctacttgggaaggctgaggcaggagaatcgcttgaacctgggaggtggaggttgcggtgagccgagatcatgccattgcactccagcctgggcaacaagagcaaaactctgtctcaaaaaaaaaaaaaaaaaaagcctgtactttcattttcggccaggtgttggatgatgcattcggtggatttttctcatttatttctcacaacggctctatgaggtgccaaaaagaagaagctctattttgcacctaaggaaactgaagcatggtgacatctgctaacctgactaaaggcacatggctagtatgctgtagcccaggtatgcagagccaggcacctagcagggactgggccacttttctgtaaaggaccagatgttaactattgtaggctttgaggaccacatggtctccatcacaaccactcagctctgccgttgtaatccaaaagcagtcgtacaccatatgcaaacgagccggtctgtctacactccaataaaacaaaatacctgctgtttagaaaaacaggtggctagcacataggtcattagtttgcaatccctgaattctagaacagacagtcaattctcattattcatagtagctatgttttctaaagtcactgtgaacactgaattagcaaatactaaaccatcacctgtaggggaaatacagggttaggtttttgcccctggttgcaatatcttcataaatatataaccttattttatgtgcgtttctacttaaagacacctggattcattaacattgagctcacagccaccagttctgtaactcatgcctgcaggaagctcatctaacacacgcattcgctccataagtcacatcaacagccttcctgttgatgtgacttatggatgttgggaagttcaagttccagaaaacaagccagcaaagaagcgctgtgtgcggccattttaaacgacaaactgccaacaaaaagcataaaaatgcaaaaaaccggatactcgatggactgcaaaaacgacactggttcgtcacacggggctgaaaggaggggggagtgcgtgagcttgttcagcctcaggtgggaatgtgtgtctcaggcagctaaaattttaagccactctaggccaggcgcggtggctcacgcctgtaatcccagcactttgggaggctgaagtgggagaatcacctgaggtcaggggttcgagaccagcctggccaaaatggtgaaacccgtctctactaaaaacacaaaaattagccaggtgtggtggcaggcgcctgtaatcccagctacttgggaggctgaggcagaagaattgcttgaacccaggaggcggaggttgcagtgagccaagattgcaccactgcaccccagcctgggtgataagagcaaggccccatctcaaaaaaaaaaaaaaaaggagagatttaagccactctacgtatgacagtgaaaatatcaagagtactgatttggaggtcacagataaattttgggaggaggagaattcacaaagaatctgtgaatgatgagaactgactgtacctgcctctatacaatactatgctatttcaaaaatccctggattttttgaagcttctgtgtgctatggaccaaaggcggggtgagggcgagacccccaaacatctagagaccctccagtggtttgccatcgtggctctggtttcagatcagtgggattactatatcctgccccaaagaggacccggtccccctacctccccaatgcaataaagcctagcacagtcctcactggcagcagttcctgatgtgcacattgtcttggtcaatgtctgccacaagggcgggcgatttctcatttgcccatccagttcacctccttcaaaaggctcctcaatggtcctaaatgcttcccctctcaggagggcagatggaccagtatctgtggcctggaatttctttcttatccaaggacttgactttcaggggttccgtgaaatcccaggaatcccatgcataatttcatgtgtatgagtggatctgcatctttcggggggagtgcctgactttcatcagcttctcaaagggaccacgacccccaaaaggttaagagcatggcattagcacagggctagaaggaggtactcccaaaccactactggaagaaactctccagccggcgcctgggtcattaatcatcccatccaaagcaaccgtggttgatgctccccaccctaggtaattcacatgctgcccctcccttcttaaggggcccactcaaggttaggaggttataggacaaatcgaacatcatccccacatggccctaacgcagaggacactttaccagccgaaaaacgtggatgtcttggtttctggtcaccagatgtgcattcttcgctgtgcacgtagctgtctccagcttgtcccctgtcagcatccaaacctgaaatcatggcgtgacagaggtcctgtttattagtttttgaggccggcctgtcatctgcaacagctgagtttccaacaacatggagctgaacttggtatgttccgtttacctcctgccgactcatgctgtccccaacacaacacagcaagcgccctggctgaagggctctgggactccaagcaaccactgctggtagcagcaaaaactggcagatgcttctagaaagggccatttggccacacactacaggaggtactatgaagctcggtccttggaccgcataattccccttctgaggatttttcttaaagtgataaatatcctaaaagaagggaaaggctgtacaggtgagggggcacttccctgtcctacaggaaacactcatttttgacgctgtggactttctatgtagttggatgagcaagacagacccttctggggtttaactcagcttataaaacgctgaccgtaaatgagtcaggttcttccgtatcgtgcattagctcacactgcatttctctgctgtgggctcagagagggtagatgacttgccccaaaccacacagctacctcttgtcctaaccaggcccagaatccgggtctttagagtcctcatggaatgtgcttcctgctctgtgattttacctcattaacccttttgttctctttgctcccagctgggagcagtcttggggctatcggtcaaagaaaatctggataggagggaaagtataggaaagaagatcatgacaattgtctcctgagtgtccactacgtgcccagcacccacgctgagctctctgttaccttcatgacagcttctggaggctggaaatggaagcgctaagagcttcagtcatttgccaagggtcacagaagaagtaaagggagaggtaggatggaaacccaggcagtgagacgggcagaaggaaggcaccgggcacctctcagggctgagcctcccgggccctctcccctagctgggtctgttttccctcaatatcccgcctgtcctaaaaataatattctttttggtgagcttcgtttagtcatagttctcagggtttgaggtaagagaacaaacactggggaaggaattgggaagttcaagttccagaaaagcatgaaaagaacgatcaggtgcacgacatggctaatgtcccatgctgtgatgaaggcaaggtactacaggaagggtccaagaccccagctccagtcccggctctgctgcttcccaatgtgagaacctggggaatggagacgcctcacttagcctcagtttctacatccatacaaggggctgatttagaaaatatcctgtgcagccaggcgcggtggcttacgcctataatcccaacactttgggaggccgaggcaggtggaccacttgaggtcaggagttcgagaccagcctgaccaacatggagaaaacccatctctactaaatatctaaatatacaaaattatccaggtatggtggcacatacctataatcccagctacttgggaggctgaggcaggagaatctcttgaacccaggaagtggaggttgcagtgaaccgagatcgcaccactgcactccagcctgggcgacagagtgaaactctgtctcaaaaaaaaaaaaaaaaagaaagaaagaaagaaaagaaaagaaaatttcctgtgcaagatcgtatcttagactttaattaccaactaacctgccccatcccaggcactcccctcctcctgtcatctaacaggaaactagaatggtaagtcacatgcacactctgtgaataaaatatctcgtcttgggctaacatagttttgagaaggagaaaaaccccaggacaaagatggaagcagaaaatggaaactccagaagtcttaggaatggccagggccccactgcagaccccacgatgaagcagaaatgggcctccagcggccagacttccggaagcaaggtcccgttggtgatttccttatgacgaaccaggcctgtgagccaaatgcaagcgacagaattgggtttacaaggaaacaggcacgcaggggtgggagtccccagtgggcctgaatgttgcctggcatctaacctgtcctcctgccatggccctgctgaaaggacaggccccaggatgcagcagagagccacttttgagtggaggccggtggcaggcacacgtttccaggagctccaggccaatgagtttggttgttcacacctcccttggtccactgaggaccaggtcctcacgcgccctctgctggcccctccagattcaactcctagtatttttttttgggtcgccactggtagagtgcaaaatgctaatacgacagtgtgatggcgctgacggtcactctgctgggtggtcactcactcacttggccacacggcagacagaccggcgtgctgatcactcaactagaatttaatcagcagccatgcacgctggacactgctcggccttgagcaccagggagcccagtggagtcaggggagtcatcggtacagtaaaggcaaacgctacacaagatgtcttccaaaatcagggctggagggccaggcacagtggctcacacctgtaatcctagcacttcggagactgagacagacagatcacctgaggtcaggagttcaaaaccagcctggccaacatggtgaaaccctctatctacaaaaatataaaaattagccaggcgtggtggtacgtgcctgtaatcccagctactagggaggatgaggcacaagaattgcttgaatccaggaagcagaggttgcagttaaccaagatcatgccactgcactccagcctgggcgacacagcgagaccccgtctcaaaaaaaaaaaaaaaaaaaaaatcacagttggaggggcagaaacagtgcctgtggcccattgcagataaggcactcctggtgtcctctgctgctcctcccaccctttccccctgtgatctccctgcactgctgagggataactggcattgccctggagtgcccttccctgcgggcagcccgccctaccttgatgccagcattcctcagggtctccagcgtgggccgcacatctgcctgcagctggtcctccacgcccgtcaggcacagcagttccatctccatctccaggctctcgatcaccgtggccactttgagggagcggtcgtgcacactcagcttggcctggacgtagcgggcctgggacacaccagcagatgcagtcactgcttagggtgaggagaggccaggctgactggccagtgccaagagtggaagggccacacccgatccccaccacacggggtgggggaccccagcaggtgagctggaccccacaggggtgacataggcttccagcttcctcacaagtcctccatgtagacactgcacagacctgagtcccaccctacactccacactcacctgctgggagacttccagcaagtcacttaacctctctgagccgtggccacgaaatggcaataacagcaccaacctcattgggttgtctcagggacgggcacaaccaagatctcaaaaaaacagtaagttctcccatacacaacatgcactttgtaagccaaactgtgggtcaccaggttttctaaagaccaagtcgagcttctgaagaccatcaacccaaactgccgcttcttctctttatcatgttagcaaaaacctggaggaaaaccagtcatctaatgggcccgcttgaagcacatgcttttaaaattaaaaggcaggtagcattgatcggggctaaaatgcttgttaaataatggcttacaaagaactcaaatatattaaagagagatccaggcagtttccccgcatggagcagggcagggccccacgaagcgtgtcccgcctccctcccttgcattcctgcacgctggatttaggccaggcaccagagacacggcagtaaacaagacgaggaccctcccctcagggaacacacaatctatgggatgggatgacaataagcaagtcaataatctggttcaaccccaacatttttacagcttaaagaaattagggaggccgggtgtggtggttcatgcctgtaatcccagcactctagaagaccgaggcaggcagatcacctgaggtcaggagtttgagaccagcctggccaacatggcaaaaccgtgtctctactaaaaatacaaaaattagccaggcatggtggcacatgcctgtaatcccagctacttgggggcttgagggaggagaatcgcttgaatccaggaggcagaggttgcagtgagcagagatcgtgccattggcactacagtctgggcaacaagagtaaagctctgtcacaaataaaaaaaaaaaaaagaaaagaaattagggagccgaaccagatgcggtggctcacacttgtaatcccagctacaaggaggttgaggcaggaggatggcttgaggccaggagtttgagaccagcctgggcagcatagcgagaccccgtctcagaataaatgtgcaaaaaaaaaaagagaaaagaaattagggctccaagagaatgatttatgccaaattttcccgaaggcataccatatgccaaggactatctttaactactaaggatataagaataaaccaggccaggcacagtggctcacacctgtaatccctgcactttgggaggccaaggctggtggatcacctgaggtcaggagttcgagaccagcctggccaatatggtgaaaccccatctctattaaaaatacaaaaattagccgggcatggtgacgggcaactgtaatcccagctactccagaggccgaggcagaaggatcccttgaacctgggaggcggaggttacagtgagccaagatcacaccactgcactccagcctgggcgacaagagcgaaactctgtctcaaaaaaaaaaaaaaaagaagaagaagaacaagaataagaagaacaaaccagacttgtaaagtccctgtcttcaaaaatattttattcccgaaaggagatggataagatgaatgttaaaaaaaaatatatgaacagggtcaagtttatattcttctggcctctccagattcaactcctagacatattttttggccccaaatggtagcacgcgatgacagtgacaaatgcaatgaacaaagtgaaatggtatgatggatggaaagtgagaaggagccttagacaggtggtccaggaagacttcttggaggacgtggcttttgagctgagacccaaaagaagcgaggaaatgggccatggggctctgtgggtgaagagagttccaggcagacagaacggcaagtgcaaaggccttcaacaacagtgaacccagtgtgcccagaaatgacatcagaatggctcgcataggatgagggatggtggaaggagtgactgggaggcaggtggggctgcaaaggcaatggaaaggtcccagaacaacttacttcaaagtcctgatactgctcctctgcaagagacttctttgccaccacgagcacccgcagcccttctcgggccatgttgccacactgaaaaatagaccacggtcgagtgggagcggtgctgagagctcctgacctcactggggaaggaccagtgcccaagtggatgtgcccctcccacagggtcagagaaaatggcaaatcagaaagttgctttcccctacggcaatcctccctggagcaagctttctataggggaagttgcagagaggcagccggtgagccaaacacagcccacccacaggtcgtcttcaactagcacatgtatgtttccaaatttaagtcaacattgtgcggtctcacacacaaatctggactgctgaatgggtggaaaaactgagcatctgacaaaaccaggtgcattttcccaaataaccacaatcaatgatggctgaggagcagtggcctccacgtgttcccaggaagtggaggtgtcaagtgaagaacactccagcacgttttacacgcaaagtgcaactctgctcaaaatcacaacctgtttgttcatttgcattaactgccaggcccctgtaggcatttgagtttgcaaccctcaaactgagaatcttatgcaaaatgtaaattccccctagagctaagagatgggacaaaaatggcctgaaaactgcctccctcctgctgctggccaactgtccacgtcacaaactgggttgtgcagcctctgatgtggcccctcctggaactcacattctggtataatcgcctaccctttgagtgtgtgctggacctagtgacttgtccctaacaaacagaatgggcaagagtgaggggatgtcacatctgagatcaggttagtaaagacagtgacttccatcttgtttgccctctcctgttccatcacctgctctctttgttgaagctagttgccaggctgtgagtggccctatgggagaggcccacctgcaaggaatagagggcggcctctggccaacagttggcaacaacctgagacccttagttcaacagtccaaaagtagctgaatgtagcccacaacaactgagcttgctcacaaatggatcctgccctggtcaagtcttgagatgagaccacagccccagccaacatctgaattacggccagtgggaggccctgaagcagaggatgcagttcagccacaccagcatccctgacccacagaaaccattatatattaaatgggtgctgctttaagcagctgcatttcagggtggtttgttacacagccaccgataacaaatacagagacccaccttaccatgcaaggggctgcctctgcagaacatgcttccaaggcctggtttaacttcctgcatcacacttacctcttcctccaaccagtcattgtactgcacaatgccagccatgaccacatctgctcccttcatgtaaaacgtaatttctccagttgattcatcctagagagggaggccggaaggaatgagaaactgaaaggaacaccctctttcagcggcaaagcccgcttcccatgacagacagtgtacaaagtgcacttaacagacaccaatgttttttcagttggctgaagatgaaaagcgagaaggggcctcatttaggggcaaaggctacagaaagtaaaaggaaaactcaaagcacttggaagattttcaatgatgaaagaaagatcaaatggatttaagacctttgttttgaaagttattactatttcaactggaatagactcacatgctatgattttagatttacacttgggactgcagatatcatcaaactgtggtccactgaaagaatagggaagataaggactagaacagggagtctcaacctcgtcactgtgaacatttggggccagataactctttgctctgcagggcccctcctgtgcactgtacaatgttgagcagcatccctggcccctacgcactagatgccagtcatacaccctccatggtgacaaccagaatgtctctagactttagcaaatgtctcctgggggcaaactgactgtctcagctgagaataattccagatccctaagtctaactaaggacttgcctagagatccaattacccagagtttcagttcaccctaaccagattttctgggtagtgggtagcaccatggcacaggcatcaaatgcttggaccaagtaccagtttctagttgtgtgcagctggacaagctactcctcttccctaaacctcagttttctcatctgtaaaacaggaatcaagcatgtagcacagagactgacacatggaaaggacccctcagtggtataactgctgctgggatgagagtgatttcccaagtcccccagccatactgtacgtagagaacaaggctcagcccagtactctcaacagggcaatgtggccctccaggagacatgtggcaatgtctggagacactctaggtgtcacaacgcaggcaatgtcctactagcatctgacgggtggaggccaggggtgctgctcaccctcctacatcacacaggacgcccccaaccaccaccaggaactcctccagccctaaaagtcaacagtgctgagactgagaagtcctagctctgaggaatgacggcgcagccacagatccttcccccattttcccccaatgattcgcgtcactgggaggtgggaggcagtaaagataagcaagaaaactgagcatggccatcaataccttgtgcctaaattttgctactccaggaagcccagaataaatgcccggaaagtcttcattgaatatggaaccgtggagacaaaagtgactgcatctcaagctgggtgtggtggctcacgcctgtagtcccaacactttgggaggctcaggtaggtagatcacctgaggtcaggagttcgagaccagcctagccaacatggtgagaccctgtctctactaaaattacaaaattagctgggcgtggtggtgcatgcctgtaatcccagctactcaggaggcaaggctggagaatcacttaaacctgggaggcggaggttgcaatgagctgagattgcaccattgctctccaacctgggcaacaagagcgaaactccatcttaaaaaaaaagtgactgcatctcaggtgcaaatgcgccatgctgacttctgattagcccagtcccatgaacacccccgattcctacttaattcaccgtccttcacataagaacatgtcaaccttgatgttatcgcacaaattacaggtgatgaaacatacagctttcttgcctctcctggaaggtgcccgtaattgtcctgctggggcacgcggaccctttccctgtggtataagccctgggtctagggagtaacagtatggacatccacctgttttcctgccgcccaaaactacacttctgtctgttcggctcccccaaaaaccacgcttctatctgtaagtttcccccaataaaacaccctttaacgacaaactggatttgcctgccttgttctttggtttcaggctcctttggaggccactttgtctatgcagccctttcatggaacagaaatatccaaaatcagattagtggtagagtttcctcttttagaataactttcaaatgccccttaatcaccaacaatcttttagaacaacatgctgactcataagagcacccccaggccaagacaggcacccacgtttaaaagcgttcaactgcacactttatctctgatagactgtggctatgcctgctcttgacgcaggccaaagagagctgtggggtctgcacattaaagaatcagaggttttattttttccttccccccgacaaccaaagggtgctcaacaacatgtggctgtaggaaatgatgctcccagcccagcttcctcactaagaaaagggcttgagtgagttcagaagttctgtccaatataaataccgcatcaacgatcccctcccatgagtcacttcctcccacggagttcatcacaagtttatttcgttcccatattatggcaagattacgccataaatttacagagatcggccggctgtgtggcattgtttgggggcctcatcttttcccaccgtggtctgcatctggcacctgctcaaaggcctcttttagtccagcaatgacagcgctacgatgatctacagccacgatccaaacccgtggctccacgtgggaagggggagaaggcactggaacatcttgtacgccacaaaaacaaaacagggacacaaccttcctgcaaaaagacatcacacgagtccttctccaaccttgcctgatttcttaagagacagacattcacacaaggaaatggccttgctttgtgggtgcaagaaggtgccatcttgcactgtgcgtgcactcacacatgtttaaaaaagagacaggggagacccaaactggggctgtccacagtcactaaaccaagtcaagagaatttttcttttttttcttattcttttttctttttctttatttttttgagacagggtcttgctgtgttgcccaggctagagcgcaatggcacaatcacgactcactacagcctcgacctcctggactcgagtgacctcaacctggacctcctgacctcaaccttcccagtagctgggactacaggtgtgcaccaccatgcccagctaatttttttgcttttagtagaggtggagtctggcaatgatgcccaggctggactgaaactcgttggctcaagtgatcctcctgccttggcctcccaaagtattacaggcaggagccaccgtaccaagcctaggagaagttttataactgaactaaaacttcctcacatcagataactggacagtcatttgcatagagcatttgggttatatgaacacatcataacagggtttctcaggcccttcctcaggtgggggctgtcctgtgcattgcaggatgctgagcggcatccctgctctccacctatgacatgccagtagcactctcagcctctggttgtgacaaccacaaatgttgccagacattctcgaatgcccccaggatgagaaccatcacattagaggagtgtggtgaggtttgtgccaaggggagaactagtccaaaagccccagaggcccagttccaccaacccaaccaaagataaagaggtcagaaaatgagaaaaaaatagcaaaataatacttatttcattaaagacaacctcaccaagatggacattcacagcactatttttagtagtcaaaaccaagaaaaaagcgaggcgcagtggctcacacctgtaattccagcactttggggggccgaggctggtggatcacctgaggtcaggagttcgagaccagcctgcccaacatggtgaaaccccgtctctactaaaaaatgcaaaaatgagccaggcgtggtggcaggtgcctgtaatcccagctactcaggaggctgaggcaggagaatcacttgaacccaggaggcggaggttgcagtgagctgagattgcaccactgcactccagcctggatgacagagtgagactccatctcaaaaaacaaaaacaaaacaaaacaaaaaaactgaaattgagaaacagcctaagcagccaaaaaataagttaatgaatgaaatagtggcacattctttcaacagaacgctgcacatgcgttaaaaatcattaaaatcagattttaataatacgaaaaaattctcatcgtatacatatagttcaatgagggaggaagtttaggaagccttctatggagttcagtgataattttacaaaaatgtgtgtggatatttacactcggatatgcttagaaaagagactgaaaggaaatcccttgaaaaggtaaaaggtcttttgttgggtgaaaatggagatgaactggtcaggcacggtggctcacgcctgtaatcccagtacttagggaggttgaagcgggaggacagcttgaggccagaagtttgagaccagcctgtgcaacacagagagactttggctctacaaaaaatttaaaacttagctgggtgtggcagtgcatacctgtagtcccagctacttaagaggcagaggcaggaggatcccttgagtccagcaggtcaaggctgcaatgagccatgttcataccactgcactccagcctaggtaacagagtgagactctgtcttgagaaagaaagaaaagaagagaaaagaaaaaaagggagggaggcaaaaaaaagaaagaaagaaaggacagaagaagggaaagagggagagggagagagacagaaagagggaaggaagggagggagaaaggaaggaaggaaggaaaagagggagggagggaggaagaaagggagggagggagagagagagggagggcagttttgatccccctctttacctgtaactttttgttctaaatgccttaactgtgaatgttttttaataacctgggaaggggggcatgccaggttaaaacaaaaatagatctgcccatctgacagcatcacagactctaagcacagagtccctgttcttcctgctggaagacacacgagccacatctcaaaaaaatataacatgtccttcacaactagctgaagagtggcgtatgccattcacttcttctaggatggctgacattagggactgctcaatgataagtcaaccctcaaatgaccctagcagagcccacagccctacgtcttgaacaacttcagactggaacaaaattaaagtaattcgataggagataatgacactcattccccaggaaacaccccacccacaggatctatgctgctgcttccagaccacagatgttcttgacatcagatgcacactcaagatacggtttagaagccagggatccagccaggtgtggaccagtgggaaaagcagcagctgtgtgggagagaaagctccctctccacccaagagttgccaaggacacaggtcctgcagagtctgaaagaacctattggcctctggacataaaaatcccctaacatagggccgagcgtggcggctcacttctgtatcccagcactttgggaggccgaggtgggtggatcacctgaggtcgggagttcgagaccagcctggccaacatggagaaaccccatctctactaaaaatacgaaattagccgggcatggtagcacatgcctgtaatcccagctactcgggaggctggggtaggagaatcgcttggaccccggaggcgaaggttgcagtgagctgagatcacgccattgcactccagtctgggaaacaaaaacaaaactccatctcaaaaaaaaaaaaaatcccctaacgtgtgatgtttcaaagcatattcatggtgtgcgtctctggttcctcaatacaagtgctcagtgccacctccatctcctcctgggcaggaagtcttcaaagtggctcgcaatgccccccacctcctggtactcatgctgtgtgtcagccacccccctggagtggagctgggcctagtgacttgcttctgataacagcatgaggctgacgtgaggggaggtcacctctgacagtgggtgacagaagactgtgactgccatctcattcactctcacctgctcactctgaacaggtagctgacaggggagctgactacagggaggccctcgtgggaaggcactgagggtggcctctggccaacagccaggaaagaactaaggccctcagtccaacaacccacccagagccaaactctgccaacaacactgacgtctgtatgtgggtcctaccaccatagaatcttagaccccttgagcccaggctgtgagagaccctgagccagaggacccagccaagcctgccacagaaattgtcctggccacaaaaaccatcagatagcaaatagaaaacagagcccccagttaggtgtggtggctcatgcctgtaatcccagcactttgggaggtcgagatgggaggatcatttgagcccaggagtttgagatcagcctgggcaatatggtgagaccctatcttcactaaacgataagaattagcagagcatggtggtgtgcacctgtagtcccagctacttgggaggctgaggcaggaaggttgcttgagcctgggaggtcgaggctgcagtgagccatgattatgccaccgcactccaccctaggcaacagagcaagatggacggaaggaaggaaggaaggaaaaagagaagagaaaagaaaagagaaaaggaaggaaacagaggaggggaggaggaaggaaggaaggaaggaagggagggagggagggagggaaaaaggaaggaaggaggaagggagggagggagggaggaggggaggggaggggagaggacaggaggaacttccttactccagggaaatacattttctggagtaagggaatgcatttccctgtaagaaagacaccaatggatgtctaagaccatgaataatactgaccccatatacactatgttttttcctacacatacatacctatgataaagtttaatttatgaattaggcacagtaagaaattaacaacaataacttataacaaaatagaacacataatatgctgtaataaaagtaaataagacttgcttgaacgcaagcacggcaataccacaacagccaatctgagggttcctgagtgactagcaagcaggcaggtagatggcgtgagtacactagacagatgattcatgtccgggaggatggagtgggatggcatgaaattcgtcacactactcacaatggcacacaacttaaaacttatgaattgcttatttccggaattttccatttcatatttttagactgcagttgaccatgggtaactgaacctgcagataagtggggattaccatattgctgttttaagccactaaatgtggggcaatctgttatgaagcaatacgtagttaatatcccaccctaacattactgtgggtcttttgtgagcttttcgatgtccctctcgtcacaccccagccctaacccccaagtcctggcgtagagagctgggagctggaagccaggcagcctggagtgagttccagccccactaattccagctgtgtgaacttggacaggtttcccagctcccctcaattccagctgtgtgaacttgaacggtttctgagcctccttccacttcaattttctcccctgccaaacatcagtcctaatggtacctacctcacatggttatgtattaaatgagttacttcatgcaaatcacttagaacagcctctggcacacaataagcccctgggcggggtaatcccaacactttgggaggccaaggtgggcggattgcttgatgtcaggagttccagacaagcctcgccaacatggcaaaaccccgtctctactaataatacaaaaaattagccgggcatggtggcgcacgcctgtaatcccagctactcgggaggccgaggcaagagaattgcttgaacttgggaggtggaggttgcagtgagctgagatggcaccgctgtactccagcctgagtgacagagtgaaactgtgtctcaaaaaataaataaatgttacttgtcattcctgtcattcttcttactactgctgctgctagtggctattaccatttctactactatcccagagctgcccatggcactaaagctacacggtaaatgatcaaggagaagagtggtgcaaagataggagggcgagaaaaagctgtgagttgtttattttaagtatcttatttgataacttccctaacattaaaaaaaaaaaaaaaaaaaaaaagacaactggctatcactgttgaatcctgctcacttcggcactgactgtgagtctaccgtgtgccaggcaggaaagctaggcacaggagacacgggaggaccaaaaggatcctggcccctgttctaacccacagggagaagacaggtggtgacaagcaaacccgcaggaaatcaagaatttcagtgtgatgaatgctacggaagaagaacgagatgctgtaagaggtggtctgaattcaaggaacctgtaaggctgaaggagaagttcacaagccaagccttagctgaaaattctccgccagcaggcagggggcagggccatgtgcccaacaacctatgttatcaatttctacttctacttgtgcactctgtttttttttttttatttccaaaggtttttggggaacacatggtgtttggttatatgagtaagttttttaacagtgatttatgagattttcgtgcacccatcacctgagcagtatacactgaacccaacttgtagtcttttatccctcaccgtcctcccaccctttcagccccctgactcgccaaagtccattgtattattcttaagcctttgcttcctcatagcttagctccctcttatgagtgagaacatacgacatttggctttccattcctgagttatttcacttagataatagtccccaatcccatccagtttgcagcgaatgccattaattcattcctttccatggctaagtagcatttcatcattttatatatatatatatatatatatatatatatatatatatatatatatatatatctcatagttcctttatccacttgttgactgatgagtatttgggctggttccatatctttgcaattgcaaattgtgctgctataaaaatgcatgtgcaagtatctctttcctccatgaggcatgaaacacttgggtagatcagggtggagaggattctcatttgtcaaggaaaaaaaaaaaaaaaagtccagaaaagatgaaagagccttattccaaagatccttaagatctgaaggagagttttctgcaacgaagctaaatgatgtgaggaaccaccccactccaacataggtgtgggactgaaccaaggaatcggtattttcaaagctccctgggaaaaatcagacaatcatgcagactgcagaacaaccagaccaagtggcatatgaacaccagattttccagcctccccacgacggaaagtgtgatctccgtgggtaaaaagagaaaacagagggatgggcacagtggctcacacccgtaattccagcactttgggagtcccaggcaggagaatcggttgaggccaggagtttgagaccagcctgggcagcacagtgaaaccctgtatctataaaaaattaaaaaatgagtcagccctggttttgcaagcctgtagtcctagctactcgggaggctgaggtgggaggactcttataaatacattcttttaataagaatttaaaaattaaaaatttttaaaagagccagtagaaaaacaacatatcaaatccaatcagactcttcagactggcaaaattttttaacgtgcccggccacaaggtttcttttttcatcattttgatgaaaatgttttgaaacatgagggaagtggtggctgagcaacactgtgaatggactaaatgccactgaagttttcactttaaaatgattatattatgtgaatttcacctcaataaaaaaatacatgttcaatattaaacaaaagagaatgagagatgtattaccaagaaatccccaatggacgttctctttaactttcactccagaaccagggacaccataagcggatcagagttacggggtgtgtccaatgaatgaactaatttcctttctgcttagggaattatattcccttgttagtctgggtgacagataccacagtaaagagggttagaaagaatgtcaacccacagggacacacgcagcacacctggggtacttaagcactttaagccatgaataaaaacgactcacccgcacgatgatgcccatacgtttgctttcataggtgaaagggaagatctgtaggatggtgaagttcaggatctggtcgccaggggtcctcagctgcatggaagactggtctcggcccaccagggttaagcccacactttccgtccactgtaccagggccacctaaacataacacagggtcgaaggtcagatgcccagccgagaatctgggttcacaggctgtgctatgaacacaaaggcagaagggggctcagagacaggggaatcacagtagtcactgcccttagggacgccaagtgctctgtgctggcccatgacagtgtctgttcctctgggtctatgagggctcccacactgaaagctgcccctctataaggcacaattcatcttttctaggctcaaaacaggctgcacaccagaggcatggcggaaagagatggcacagaattaagagtgattgtgactgggtgcagtggctcaggcctgtaatcccagcactttgggaggccgaggtgggtggatcacctgaggtcaggagttcgagaccagcctggccaatatggtgaaaccccgtctttactaaaaatacaaaaattacccaggcatggtggcggacacctgtaatcccagctacccaggaggctgaggcaggagaatcgcttgaacccaggaggcagagatgcagtgagctgagatcacgccattgcactccagcctgggtgacatagcgagactctgtccccgtccccaccccacaccacccccactccgaaaaaaggagcaattggcacaattacggatcactcctggaagtatctgcaacaagctaaacaataaaaaaaagaaggaagagaatgctgactgacacagcccttcgccttcaggctctcctttcagcctcacacactgcactgggggagtgtcttcagtggttctcaactgggtgattctgtcccccaggggacccgcgccaacatctgggggaatctgtacttgtcacaactggaaggaggtaatgctggtatccagtgggcagaggccagggatgctacaaaacgtcccgtaacacacaggacataccacaccagagactgatctggccccaaatgtcaatagtgctgaggtggagaacacgggtccacacagaagaggaaaccaaggctcagagcagttaatgaagttgcccaaggtgacagcgctggcatgtggcaaagctaggccagactggcacctggatccgcctggtgtaaagttccacagcacacactcttcccttccaagagtcatcgcacgggtgtcaagtcagaaccttctcatggcctcagccagacatactcagcttaaggtcaaaggcatgagggttgcaaactccaagacaggggccagagtgttgatacaaatagcaaagagggctgagtgggggctgtggcaagcaggagcccagccccagccaaaggaggctgctgccactatacacacaggtggcagttactgccctgcagggactagggccagggtggatggagcttccagtttctcaagaaaaaacagaaatttagacttctccccgagacggcctaacttttaaatgtaagcaattggccagctgctgtgactcacacttttaatcccagcacttggggaggttgacgcaggaggatcacttgagcccaggagtttgagacaagcctaggtaacacaaggagaccccatttctaaaaaaaaattttttaattattagggtggtggctcatgtctgtaatcccagaactttgggaggctgaggcaggcagatcacctgaggtcaggagttcgagactagcctggtcaacatggtgaaatccagtctctactaaaaatacaaaaattagccggaggtggtggcatgcgcctgtaatcccagctactcaggaggctgagggaggcgaatctcttaaacctggaaggtagaagttgcagtgagtagagatcgcaccaccccactccagcctggacaacagagcgagactgtatctcaaaaaaaaaattattattagggtggggtggtgcatgtgtgtcgtctcagttactcaagaggttgaggtgggaggatcacgatctgggaggtggaggctacagtgagccataatggtgccacactactcccacctggacacagagtaagaccctgtctcaaaaacataataatagagccgggcgcggtggctcacacctgtaatctcagcactttgggaggctgaggtgagtggatcacctgaggtcaggagttcgagaccagcctggccaacatagtgaaaccccatctctactaaaaaaataaaaataaaaaaaataaaaaataagctgggcgtggtggcaggcgcctgtaatcccagctaccagggaggctgaggcaggagaatcacttgaacccaggaggcagaggttgcagtgagccgaggtcgcgccattgcactccagtttgggcaacaagagcgaaactccatctcaaaaaaaaaaaaaaaaagataaaaaacacttccagtggaggtgatgcctcccaagtacccctctccctatcacctacctgcagcccctgtcaacaccctcctaaaacctgcctcccctactccccctaaagattaagctttatgagaggaaagtgggagggccttccttttcttctttcttgattttttgtagacactgtacctttggacttggatgggaataaagtgacagcttgtttggcattgaagttggaagccctcctgtattcctttcctgttgttgctgtaccaaattactgtgcatctgtttttttttgtttgttttgttttgttttgttttcgtgatggagtctcactctgtcacctaggctggagtgcagtggtgcgatctcggctcattgcaacctccacctcccgggttcaagcaattctcctgcatcagcctcccaagtagctgggattacaggcacctgccatcacatctgcctaatttttgtaattttaatagagatgggatttcaccatgttggccaaattggtctcaaactcctgatctcaagtgatccacctgcttcaacctccctcccaaagtgctgggattacagccatgggccaccgcaccggccagcatctgttttaaaatgaaacaaatagattttcttacagttctatagatcaggggtggacatgggatgagggtctcactgagacaggatcaaggtcgcttgatcaccattgctgcattgctgcggaggctctaggggagcacctgtagtcccagctactggagaggctgagatgggaagattgattcagcctgggaggcagaggctacagtaagctgaaaccatgccactgcactctagcctgggtgactgagtgagactctgtctccaaaaaaaaaaaaaaaaaaaaaaaaaaaaaaaaaaaaaacctggcgttcctcttgagttcccattccttttaccaagagagctctgcagaagccacaaggcaaaggtatgcagctctccacccctagtcctttctttctctggaacccctggatgtcatcttagctgacctgctataccccgaagaagagatcaagctggagctcaaaactggggttccagtccccgctctgtccccagcccccagcccccacaggcctctgcaaaataaagatcttggagtagatgactatttctcatttctgctccagctctgaaaatgtatctttatgcatccttagtctactatgctcagatatcgagttcagtttctgttgcttctattaactaaatttacattagcaagaaattatttttcaagactctcccttatttaagttcaagtcataatgagtcagccagcactaacgagctttgagctttgaccaatggaagaaactgtcatactgacctctacctttcaaagaaaggaccaatcaagtagtgggtttttctgtttttattttgtgtttttttagttttagtttttggctactggcctgcctaagtctttgaaaactcattcacttagttatttgtttaatttaatggctatgctatagactatgtttatgtcccctaaaattcatatgttgaaacctaatccccaatatgatagcagttggagatggggcctctgggaggtgattaagtcctgggggtggggttcctcatgagtggatgtgtgcctttatgaaagaaaccccagagaggtccctcgctccttctgctgcgagagacagagtgaaaagagggccttttatcagccaggaaacaggccctcaccagacaccaaatctgccagtatgctgacacaggacttcccagcctccagaactaggagaaataacttctgttgtttacaagatacccagttgatggtattttgttatagcaggccatgttatagcaggccaaacagactaagacactctaactttcaatatagccctgttttgtctgctaacaattgtcttccaaagtttaaaattaacaaatcagtaatgattcgcatatataaaatcataccagccaggtgcagtagctcatgtctgtaatcccagcactttgggaggccgaggcaggaggatcacctgaggtcaggagttcaagaccagtcaggtcaacatagcgaaaccccatctctacaaaaatacaaaaactagccaggcatgatggcgggtgcctgtaatcccagctactcgggagtctaaggcaggagaatcgcgtgaaccccagaggcagaggttgcagtgagctgggatggcgccattgcacttcagcctgagcaacagaacaagactctgcctcaaaaataaataaataaataaaaacaagaaaaaaaattatcccatctgtctatgtaaaaaagcttgggtgcagtgtagaaatgtttatagagtgatacacatggagagaattacttctagcttttacttctagctttttttttttttttttttttttgagacggagtctcactcttttgcccaggttggagtgcagtggcgcgatctcggctcactgcaaactccacctcctgggttcatgccattctcctgcctcagcctcccaagtagctggtgcccgccaccacacccggctaattttttttttttttgtatttttagtagagatgggtttcaccatgttagtcaggatggtctcgatctcctgacctcatgatctgcccacctcggcctcccaaagtgctggaattacaggcatgggccatggcgcccggccacttctagctttctataccaccgaaatgtttcaaacgtgtatacgcatttcttttacgtttaactttaattaaataaacatcccaatacaattcaaatattacaaatacctagttatgtacaagctaaaaaaccctgactaaatttatatccttccttatatacctattaagtaataaagtaaaaaaaaaaattattcttcaggtactttcaaacacttatggaaatgatttttttattcctattctcaagtagctattactttgcctgttaattgccctgaaaatatgtgaaaagtctgtgatactgggcttccaggagatacactaattccccaaaagcctgcttttaactttaatcgagaaagaatctgtaactccagaaccagaagtggcttccagggctgggcagcagaatcggccagcccagcatgcccagctacagaccccacaggttcatgttagtggaaacgttgaataactataacctgaaatgatcagaaatgacaaacgcttttgaggaaagatcaattacagctgtatgtaaacatcttttagccttgctttcttctagagcaagcctctcagtggagcttaggagcctacgacagctatatctgtagcccttccccacccctgggatccaccatcctaatcaaaacctctgcaggatctggcgaggtggctcacacctgtaatcccagcactttgggaagccaaggcaggcagatcacctgaggtcaggagtttgagaccagcctggccaacatggtgaaaccctgtctctactaaagatacaaaaattagcagagcgtggtggcaggcacctataatcccagctactcgggaggctgaggcaggagaatggcgtgaacccgggaggtggagtttgcagtgagccaagatcgcgcctgggcgacagagtgagactccgtctcaaaacaaacaaacaaacaaacaaaaacaaacaaacaaaaaaaaaacaagaacgttctcagtctctttgggagctgattccaacaggatctgagccctgcaggaagtctttccttctccccttccactctcctccattttagcttaagtcagtgttaatttaaagctactttctaacaggacacataacatcccccagagtcctactcagggaggaccagtttagaagtggggtactcactaacacctctcgattgtgggccagacaaacatctggggagtgagctgagataactgcattccctcccaaaacaaagtgatatacaacaaggttacttaacattctggcttctgttcaaagaaatcaccccgtaacacacaagatagaggatttcaggggcttgcatctcactgctgttaacagcctgagttagggtctcaataactgcaggtcaggccagcagcagaaaacacaacctcgttaaggtggatgaatgaacagatacattagacgcgagctggataaaatgctggaaaggtagaaagggcggggaggggatcctgtctcaggagtctgttgtgttttctcctttgggtgacaagaaaccaaaggggcagagcccacacctttccctgcctcaaatgcccatgtgagggactcaggccagaaaccatccgtgaaagggctttttcatcatttcttggccagcaataaaccacttgtgacaagtttttaaagttttctctttgtacctgggatgctgtgcttgggaaataagccagatcacgctcagtagccttgaattcttgtcaaaagcaggatacataccaatcatcagagcacgtatgatacgaggcgggaatgtgacatctgataaaaggggttatttggtggcattcaataagataaatacttaagctcacaaagagtcaccggtcagccctaatccagcctttcaaaattataaatctatccacagacacacggttttcttcactcaatacgaaaatacattcaaatgcaccaggcagtggttgcaggttcaaatgccgacaggcgttgggagagaagcagacaggcatagggcagggccatgtgggggtcagaagaaaactgaggcagcagctgcccagcttggccaaccactgccaggtagaagttgggcctactatttccagacctgatctttcttgagaaaaactaattttgacataaaatcaagtgatttttaaatactgcttcaatttttttttttaacatagcatgaaacaaacaaaacacagcctgctaggaatcagcggaagagacagtggcataaaaggtcacttcttgccaggcgcagtggctcacgcctgtaatcccaacaccttgggaggctgaagtgggcggatcacctgaggtatggagcctcaagaccagcctggccaacatagtgaaaacccatctctactaaaaaaaagtgcaaaaaattcactgggccggtgggtgcctgtaattccagctactcgggaggctgaggcagcggaattgcttgaacccaggaggaggaagttgcagtgagctgagatcacaccactgcactccagcttgggcaacagagcaagactccatctcaaataaataaataatagtcacttcttgatccaaatgtcttgtacttgaaattgaacttcctatcacttgactgataaaaataaatacttaagaagaaagaacagcatcatcttcctaaaatgtgatcattaagaaatgactatttatagaccgggcacggtggctcatgcctgtaatcccagcactttgtggggccaaggatggtggatcacttgaggtaaggagttcaagaccagcctagccaacatggtgaaaccctgtctctactaaaaatacaaaaaaattagccaggcgtggtggcacacacctgtaatcccagctactcgggaggctgaggcaggagaatcccttaaacccgggaggcggaggttgcagtgagctgagattgtggcactgtactccagcctgagcaacagagcaagacttcatctcaaaacaaacaaataaactaaaaatacaaaattagccaggcatggtggcatatgcctatagtcccagctacccaggaggctaaggcaggagaatagctggaacccaggaggcggaggttgcagtgagccaagattgcacctttgcactccagcctgggtagcagagcgagactctgtctcaaaaaagaaaaagaaaaaaaaaagaaatgactatatattaactctattctgagccaacactaatatcacatgggacagagcttttgcctctatggcccatggataagctaacaccaagggaggcacatctgacagtttcctacagtgtctgtaaaacactgtccagccctgctcaaacagcccccgctgtcttcttctgaacaaccacaatcctgttttgagaccccacttcggtggttaatcaataatactgatggaagaattcccctatagttcctaacctctgttctttgaccttaccccttgggtccaaggtcatggcaacgtggtggtaaaactccaacaccctcctaaatctttctgcttcacactccgagctcattcatgcacacatctgaatgctgtcattgtctggacctgaggctgaggctcaggctatacccaggcatggaggggaactgcatacatcttatggttcaccaagaatgtgctcataaaaaaacaaaccaaccaacctcgtagccgcagaaggaccgcgagattgcctgccctccccggcaccatgtacttgagctctccagcaggttttacactcacgttcagcaacaagattaagacgaggcaaaaggagacaaacgggaccttttacacacatggtcaaagatgtgcagagagaaggtggaaggcaatgcatcgtggcatgatttatgatagccaaaagggggaaacctcctaagtggtaagcttgggagatagaacaaatactctgtggtgtacgtacgcagaagaatattgtatagccattaaaaaacctcttattggcccaatgcagtgcttacgcctgtaattccagcactctgggaggctgaggcaggacagttgcttgagtttggagtttgagattggcctggtcaacatagcaagacccccattgctacaataaaatacaaaaattatccaggtgtggtggtgtgcgcctctcatcccagctacttggaaggctgaggcgggaggactgcttgaggccaggaggtcaaggctgcagtgagccaagactgcaccactgtattccagcctgggcaatacagcaagatcctacctcaaaaaaataagcaaaacacattaaaaaagaaagaaattctgtgacttgcagcaacataggtggaactggaagttgctaagtgaaacatgctcattttaattttcctttctaagggatgaatcctaatgaggtgggtggtaaaggcaagatactcagaaggtaggctgccagggtctggcagaaaaaggcttattttcaccaagctcggaagcttccccagatgagaaaagagggaagggaccaaagaataaaaataaaaaataaaaattccactgcacttggaagatgcagagtgtctgaacattacctccaaacagggcaccctgtttggctaaaaatagccagagactgtggtacttcatccagtatcagccctgagtctcccacacacaggcatcttcactctctggagcacttcaggagtttacaaagcactttcaagccatcatcccctggggaggaaagtggtattgtgggttgcatagtccagactctaggcatgggctgtctggttttaatcgtgccagctatgcgaccatgggaactttccttagccaacttacacttcatctacaaaatgggcacaatcattgtgactctatcataagaggggctcatagcccagggcctggcacagagcaggtattcaataggtgatcatttctcactgccgtcagtaccactgttatcaccattactacctcatctttagcaaggacctgtgaagtcaatggccctagtccctctttacctttgaggaggctgaggtgcagcaatgatttgcttaaaatcgcacagctaggccgggtgcagtagttcacgcctgtaatcccagcactgtgggaggccaaggcgggcagatcacttgaggtcaggagctcgagaccagcctggccaacatggtgaaaccctgtctctactaaaaattcaaaattagccgggcgtggtggtagatgcctgtagtcccagctacttgggaggtgaggcaagagaattgcttgtacctgggaggcggaggttgaagtgagccaagatcgtaccaccgcactccagcctgggcagcagagcgagaatccgtctcaaaaaaaaaaaaaaaaaatcacacagctgattgaattgaaagttacaagttaaacatggccagcaattgcactgcagaagcagggaaggccaatgtgatgccctcaccttccatgaaagtgagtagacagggtcttgaaatacagacatgcatttatgccactgggaggctacaggaacccacggcagatgtttcagtaaaactcagccctcgctgaggtcacagtgcaatgatattccatgtcctggcacatttgtaaaaactgagctactaaaagcaaagtgtaaagctgcatctataatttacagttgtgcttttaaattttaaaaaatactttaataggctgggtgtggtggctcacgcctgtactctcagcactttgggaggccaaggtgggtgagtcacaaggtcaggaatttgagaccagcctggccaatatggtgaaaccccgtctctactaaaaatacaaaaattagctgggcgtgatggcgtgcacctgtagtcccagctgctcgggaggccgaggcaggagaatcacttgaacccaggagacggaggttgcagtgagccgagatggtgccactgcactccagcctgggtgacagagtgagactccgtctcaaaaaaaaaaataaaaaataaaaaatatatatatattttaatgaagcgtgagggtaattctaatacatgcaaagaattatctctgcaagtatactcagatattaataacagcgggtgtcgcagaggaagaagcctgggagaatggaagtcagggaaggagagcaacaggcttctcactctgtgccatgagcatgtgctagccatggagacactctgcatgttacctagaactgctgattcattgctctggaattattcagctattcaagacccagtgaaatacagcaagcagctttcattcatacacacacatgtgcatccatgtgcacacacatactaacatggcacacaggaaaatacatcacacatacacacacacacacacacacgtatacctgaacacaagcgtaagtcctacagaaatgtgaaagtcatatgactttcttttttttaaattttttttttgagacagtctcgctctgttgcccaggctcgagtgcagtggtgcaatctcggaaagccatatgactttctaaaggaagttacttaattcaccctccttcctgtttaattatatgtactacagcatgattctgtactggtcctctctctctctctccatatatatatatacacacacacacacaaagtaaatattattttatatatttatatattatgtcaatatttaaattattatttacataatatatatttacataatatattatataatatatatttacataatatattatataatatatatttacataatatattatataatatatatttacataatatattatataatatatatttacattatatatatttctttacatatttataatatgtaaatatttacatattataaatatgcatatcatatattatataaatacacataaaataaaataaatatatatgtatatttaaatatgcatacatttagaaggagtctgagaaaatctataccagaacataaacagtagtagttatcgccaggtggcaagaatcacaggttattttttatcttctttttgattctacaatttctcccttttctgtagtgaagacattagtacttgtgattttaaaaccttttttggccaggagtggtggctcacgcttgtaatcctagcactttgggaggctgaggtgagtggatcatttgaggttaggagtttgagaccagcctggccagcatggtgaaaccctgtctctactaaaaatataaaaattaaccaggcatggtggtgggcacctgtagtcccagctactcaggaggctgaggcagaagaatggtttgaacccgggaggcggagattgcagtgagccaagatcacaccactgggcgacagagcaagactctgtctcaaaagcgcctggccaaaaaaagaaaaaaagttttttaaatatgaaaaattcatggaaaagacaagtgaatgagccatggacagagctgatcctagctgcttacaggacagcacctcctggctcaaaccaagaaacaaaggcttggaaagttgcattatcaccaaggcccccactgccactccccaccacccactctcgacactgtggaacatcctggaaatggtgggatgctgtcagggctgaggcctgctcgctccagcatctgagcagtgctccgctcctccgggtccgactgtatctatttcatttcctccgtgacttactgtacggtggcagggagggcccagcgcccccaggctgtaatcgatagctgaataaagacacttcaaggttccccaactggaatgtgcacaggaaacaaatttaggaaatcctgctttctgttacaggaaatgaatcctacgccaactggtagaaattactccagcagctcccaagtaaaatgcatactggtttctacacatgttccataaactgaccttgcctaggctagcaatgttttattgatattgaatttcaaaggcacgattctagagccagccaagtctatgcagaatcctacagggacttggaaacagtacggctttctgaaagatttcaccttaactagatttagcctcctctgagcctcatgaggcatttatataaacctatttgtatttggcagtaggcggcctctgaagtagtttttagaaggctgatcaggaagacattaacaatgactatacctttagtaagattatgggctactttttacttttctgatcaatgcattcatgtgttctactatagacataaaataactgtgcaatacaaaataataaaagttgtaaaaaaaaaaccacagcaaggccagtcgcagtggctcacgcctgtaatcccaacactttgggaggccaaggcgggcggatcacgaggtcaggagatcgagaccaacctggctaacacggtgaaaccccatctctactaaaaatacaaaaaaaaatagccgggcgtggcagcgtgtgcctgtagtcccagctgctggggagactgaggcagaagaatgttgtgaacccgggaggcagagcttgcagtgagccgagatcacgccactgcactccagcctgggtgacagagcaagactccgtctcaaaaaaaaaaacaaccacagcaaaaaggtaacactggcctctgaagacaccaaaggccaaaggaaagtagttctttttttttttctcaatcatgattcagaatcttagaaaaacaagacaaatctgatttcaagtgcaattcatccacagaagagataaagtaccattcactttgagaaaaagcggccgagaagtgcaaagcattccatgaaagatttatcctcatggaaaaatctttgcacagccctaaaacaaatacaccaaagtccagtgggagcagaggagtgggcaacgggcattaaagcctccagagatgccaacaggagcatcaggggcctcaggcaggacttgcttctcagatcatcagcatctggagcttgctcaaatttgaattccgctgggtgcggtggttacgcctgtaaccccagcactttaggaggctgaggcagagagatcacttaagctcaggagtttgagaccagcctggctaacatggggaaaaccctgtctctactaaaaatacaaaaatttgccaggcatggtggcgcacttctgtaatcccaactacttgggaagctgaggcatgagaatcgcttgaacccggaaggtggaggttgcagtgagccgagatcataccactgcactccagcctgggcgacagagcaaaaaaaaaaggcctggcacggtggctcacgcctgtagtcccagcactatgggaggctgaaggatcacttgaggtcaggagctcaaataaaataaaataaatttgaattccatcaaatacccacaggttactggttccaagtccatagctaccaaaaatatggccctctctgacatcgctattccacagtatcattcccaaagggaaaaacagactaaacctgccaagccacagaaagaagaaatgatgataaacctgaaattgtcacttactatggcacaagtccaagtagatcaggacaatcacccaaacctaccctccctccccctctctctttctgcacacaattcccatctcagaaggtagccaggggtgtacaacatttttcactcctaaaaagcctggttcaaatgtcaacagtcacggatgaactgggttttatagcttgagctattccacaaacaccctgcaggctggaaggaggagtctcccaggtgacaaattccactgcccaaaaaagggagaaagaagcaccaggacacagaagatgacactcaagcgttcttccatttgtgaactttgggaaagatgttcattgtgccatcccccaaccgccaggaaccgcaggctcactgatacttgcaaattggtccagaactttaggagccccattcttcctaaaatgggttaaaaaaaaaattgggattcctcccaatgttggtacaagagttaaatgtttaaaaaaaaaaaaaaattctgggaagcactctggccatagttaccatgagccttatgctcatttaaagccgggcatggtggcacacgcctgtagtcctgactactcaggaggctgaggtgggaggatggctcatacccacgagttcagggctgcagtgagccatgattgcacctatcaagagccgctgcactactccagcctgggcaacatagcaagaccccatctctaaaaataaaatactcattcaatttgacccacaagatatactgactgcctacttggggcttcacaacagccccactgtgggggttccatggcacagatctggaggcacagcaagcataagtaactgcccaagtgtggagctggatcccgggagtaagtcacacactatactgtgtcacacaagcctcctccctaggggcctggggctgtcttgttagcactaatatcacagtgttagtctactcaaaagtatctcttgaattcataaacccaatcacgccacttctagaattataaggtgtaaggatgttcattgcaaaatacttataaatatcattgctaaaaattaggaataacctaagttcctacagtatgagaagttccaattatgagaatagttaggatattagggtatatgcataggtagcaattcttaaagaatgctttcaataatattcaagatgattagaaaacagaaatgataaaatagtaagtgaaaaaaggaggatacaaactatatcaataggaaaattcacgttttaaaaagtaaattaaaagatattgaaaggtggccgggcgctgtggctcacacctaaaatcccagcactctgggagatggagccgggaagatcgtgccactgcactccaacctgagtgacagagcaaaacaaaaacaaacaaacaacacctcaacaacaaaaagaaaaacagacaaagtgaaaatggataaaggatatggatagacatttttccaaagaagataaacaaatggccaataagcatacgaaaagacgctcaacatcaggggccatccggaaaatacaaatcaaaaccacaatgagataccgctccacactgactagaacgtccagaatccaaacaactgacagtaacaaggattgaccgagatgtggagaaacggaaactgtcatacgttgctggtagatacgtaaaatagcgcagccacttttggaaaacagacagacagctcctcaaaaggttaactatagagtcaccatatgacattgccaacccactcctaggtatatacccaagagaaacagaaatctacacccactcaaatacttgtacacaattgtccatagcagcattatctatatagacaaaaaaaaaaatccaaatgtgcattaattgatgaatggataaataaaatgtaatatatccataaacagattattattcagtgataaaaaggaatgaagcattgatgagtgaatatgcatggatgaatcttgaaaacatcacactaagtaaaacaggccaatcacaaaaggccacctattgtatggttccagatgtttggagtgtctgtcataggcaaatctatagaggtagaaagtagattagtgggtgctttagggctggaggaatgaggaagacaagggagtacagcaggaaagtgggtatagaatttcctttggggtgataaaaatatcctaatttgattgtgatgatggttgcaaaaaaaaaaaaaaatcccaaaatatactaactatattaagaagccatactcaccaacgcagtgactcacgcctgtaatcccaacactgtgggaggccaaggccagtggatcacctgaggtcaggagttcaagaccagcttggccaacatggtgaaaccccatctctactaaaaatacaaaaaattagccgggcatggtggtgggtgcctgtaatcccagctattcaggaggctgaggcaggagaatcgctcgaaccccagagtgggtggttgtagtgagccgagatcacgccactgcactccagcctgggcaaaagagtgagactgtatctcggggaaaaaaataaaataaaaaagtcatactttaaataggtagactgtatggaatgtggagtttatcttaattaagatcttaattatttacatcttttttaaagtatgtggtttaaatgggaccttgtgccctgttatgctggccttttgagttacaaaacaaaatctctaactttcctaattcagactatacctcaagtccaaggctattctttttagaggaaaggcgtttctttcttgtatttgaaaatgtgtttcccagcagccctgcatcatcctggctcctgtctgccctgacacattgcttccttagaaaacgcctaattccagcacagagaaaacaagcagggcctccccatgccttgctgcacctgcccaggtttacctcatcggggctggatgcctggtatacgcggcaggagtcttcgtactgcttctcggcctcagcctgatcagtcacaccgttggactcatacacgggagtcacgttgtggcagagcgcgatggccttcacggcttcgtgcacgcggctgctcatggtccgccggaccttagtggtgagcgttgggcccttctgagccggtgggtcctgggattgctacaggaaggagaaatgaacaaggaagatgaccagaggcaggaatgatttggagagtggaagaacagccgtgcagctattgtttcttttttctactgttccaacacacagaacccttagatatatctacaatgatgctgcaaataaatgacatgcaattttcagggtttgtcatttatgctcggcaaaaaaaaaagaaaaagagacagaggaaaaaaaatacaatttaatgaacgagaacgattctacctgcagattgagtgaatctatcctccctggggtggtgtcgggggcttttgacagaatgaggaccccactgcactgaaagggatcccggtagttcagagcagggcttccccacttgggtactcctatgttgggggacattatatagggtgttcagcagcatccctgtcctccagccaccagatgcgctggacgccagcagcactcccctagttgtgacaagatatgtcaccaaatgtccaatagaggccaaaatcaccctcggcttagaaccactgtttaagctcacaatcttcttggtttacaacagaaggcaacaacctcatctggtaccgtatgcaagtaacaaccatcagcaacaagcaatccagggcagtccagcaaggcgtcaggaacagccagaggaaaccttggccggatgggactcactgcaaaacggcacctggctccccactgaagctagactttcgggtgtaatggtaactgtgctcaagttttgccttgcaggctgactttagaccccagctcttgcctgagaggcagctccatggcatacaactggccttctccatcccttcctttccaactggcaacacagctcagcccctgaaaggccaggaatgggttaagtcttggaaaaatggttttgagcaacatggtaaaaagagcactgaagggtaaccaaagctaagccttattcttggatgggtggcaagcagctaggacacctgcagcaagtggtgtctgtcctctgaggctgtttcctgtcaacgagaggagtggccgggcacggtggctcacgcctgtaataccagcactttgggaggccaaggcgggtggatcacttgaggtcaggagttcaagaccagcctgccgaacatggtaaaaccctgtctctacaaaaatacaaaaattagctgggtgtggtggcactgtaatcccagctactcgggaggctgaggcaggagaggagtgaactagaggtggttttcaatccatgctccacactgagccccaggaatcctgagaaacccgctcagcaccaccaactgcagcaggatgggagatgcagcctgcagctccgttcctctgtcacacatcgggtgccacctatgcttccttttttttttttttttttttgagacatgagtctcactctgtcacccaggctggagtgcagtggcatgatctcagctcactgcaatctccgcctcctgggttcaagtgattctcctgcctcagcctcccgagtagctggcattacaggcgcccgccaccaagccctgctaattcttgtatttttagtagagatggggtttcaccatgttggccaggctggtctcgaactcctgacctcaagcgatccgcctgcctcggcctcccaaagtgccgggattacaggtgtgagccaccgtgcccgacccccacctaggcttcctttgaagaaagggttctactgctttagaatataatgaaaattaagaccactggcgggggggggggggggaaggctcattgttgaacacaagccaaatgccctcgcatctgatcaacacctgcctgcatctccagctgtccctcatgccatcttcctcccgttccctctgctccagccatgctggcctttctgttctttgggcactgccaagcttcttcctgcctgagggcctctgcacttgctgtgccctctgcctggaaccccatcccccagctcactgcagggctggcttgctcagtctcatcattcaggcctcaattcaactttacctcctcaaagaggctcttcctgggccccccagttcatggcactccacttgccttcccgttgcaagtcacattttggcaacaccctgtgtgttactctcttcattgtctaaattggcctatttacctgacggttccctctcattagaccatagaaacagaaggctcacctgagtgagttactcatcactgtattcctagtatccagggcagtgtctggtatgtaacagatatttgctgaacaattaaattaataacttaatagtcccaaggtggtggtagggagtcctcaattgacatgcattttttttcattttcaagaagtaacaactatgaaatcgacatcagtttcagattttaaatcacagatttagacaaggggtcacctacaacagtcttactgaatccacagccaactgaattgtggaggctagaaatgtgtatggagttaccagattctacattctattaaaaacatatttatccaacaggagagaagtgatctgatcctttaaaatgagtcgcactttacacccatgacacccgattgcccaaaatagagaacagatgggttacaagaaacaagaaaatgactttcacttaattttttaatactatttttagtattagcattagactcctcaggtaattagacaattactaaattattctggtcactgcggggacacagcgctctgccttcctgctctgttaacctctggtgtcaggagcacacgagtttcacttccaggccaaagggcactgcatggtaacaataattagagtaatgaatcagaactccggtttaaatgaatcattatttgccgagtgcttttaattataaagaatttaactctaaaattataaagaaaagatttacagaaaggttctctattggagagactaaatcgagaaccctttttttaaaaaattctataatttaggttctagccacgaacacgtgtcttcatttctgtccgcattcctcagcacctggaccaaatcgttatttaacattaggcgcaataacaagacctttgacaaagtaattactgtggttggcaagtttcagtatccacggatttaaatgaaaagctgtactgagggcatccttcatgaacttctggattttgtaaagcaatctgctttcatatctacaaaagtcaaatgcttccactaatatttcaaacatgggataacacagagccatgggattttgtattccaggtgaaacaattcccaagcaaggcaaaaagagaaccacagacggtcagatgttgacaaaggcctcactcaggagaccatctgacaacgaatgaattagaagactactatgatagcctgaccaacatcacaggccacaggttcaatgcctccacccacatatctttctctcttaaattaatactttcccacctttcctactaaaatgttccaggaaggagaggaaatactcattggtgctgaaactgcttcttttaattgttaaataaagtctcatttgcacaccaaatggtcatgcgcatacatccttaaggcactgaaactgaccaggggctgtgtttggatgatgcctgtcttaggcctggccttcaaacatcctcacattccccatatggaagagtttcacattgtacagtgtttatctctaacctcctccccataggccctttaacctacacacatttcttcttacttaaaaaataccaggggaaaacaaaaacagatgtggcatccacagaggcaggttatgactctttttgccctggggaaaaaccactggtccccttatggagggagggagggcagaacagctccacacgaggtcagaagtgacttcagaaccaagcacaggtcactattgggagaggaattaagatctccaaatacaaagggccctgacttgggcccctgggcgggtgtctcgaatcctataaagcccctgagtcatttatagcatcccagccaataaatgagacaccaaggcagggaaaataggcttccctttcccattagtaatccacagctagggccatttcctgacaagaactccagcctgttattacagaaaagattaatacaaaaattaaacgttgagtcaccaggaatgccagttttctttccaaatgcagttaaaacttcaccacatatgggcattcatactattaatggatattaggaatgggttgcaattgactgaaatacacttttttttttttttgagacagggtctcactctgttgcccaggctggagtgaagaggcatgatcacagctcactgcagcctcaaccttctgggctcaagtaatcctcccacctcagccttctgaataccgggaccacaggcgtgcaccaccatgcccagctttttttttttttttttttttttggtagagacaaggtctccctcttattgcccaggctgttttctaactcccaggctcaagtcaacctcccgcctcggcctcccaaagtgctgggattataggtgtgagccactgcacccagccagaaatacactattaaagataaagaatttctgttatgataaccctaactaacctgccacatcaaaaaagctcagagctgatgactcactcacctcaaagggccaccatcaaagagacaggctcagagctactacctccaaatgaatcagctgagccacaggctgattaagtgactaagtaaatccaatgtttactgttttagagcagacatcatctgcaacacaaagtcaataaatttaaatgtacccatatatcatcatcattctcaacttggatgattttgaccctcatttggtcatgtctggagacataattggttgtcacaactgtgaggggacaggggtactatagaaatctgtagcatgctgcttaacctcctacaaggcacaggacagcctcccatgacaaagaataatccagccccaataatgagaagcctgacagccactgaaactataaatccagggcttaggaccagggtgagttagcgcaactgaactgtgctagcacaaggttggatcttgccttcatttaaaatttcaatatactgttcttcacgaatgttttgcgcttgagtttttaaaatattgcactgcgccaggtgtggtggctcacgcctgtaatcccagcactttgggggaagacgagtggatcgcctgaggtcgggagctcgagaccagcctggccaacagagtgaaacccagtctctactaaagatacaaaaattagctgggcgtggtggcaggtgcctgtaatcccagctactcggcaggctgaggcaggagaattgcttgaacctgggaggcagaggttgcagtgagctgagatcacgccactgcactccagcctggttaacagagcaagactctgtctcaaaaaaaaaaaaaaaattttttttcaccaaagtatgatttgctttatttattttttttttggcacccggttaaatttgctatgtgagttcctcacttgtcttactctagtctggactgtgttatgaaaccattaaaaaccttgacatgagtgaaaagaaggaagttaaatagtgttattctggcagtggttcttaaccaggaaggcttctcagaataaccaataaagattttttaaaatatacacgccgggcacagtggctcacacctgtaatcccagcactttgggaggctgaggcgggcggatcacctgaggtcaggagttcgagatcagcctggccaacatggtgaaaccccgtctctactaaaaatacaaaaattagctggcatggtggcaggcacctgtaatcccagctactcaggaagctgaggcagaagaatcgcttgaacccacgaggcagaggttgcagtgagccaagatcacaccactgcactccagcctgggcaacaagatcgaaaactccatctcaaaaaaaaacatttttaaaatatacatacttaagatccagacccaaagaatgccgtacagcccaggcatatatttatatttatatttttaaaactttacaggcaattctggtggtcaactctagttaaaaaagaaaggaatatgatgggttctcattgaaaagaaaacagagacagagagaaataaagaacgcatctatccagacacacaaaggcagagcatttggcgttttgtccacccaggtgttaatactggttactgccgaatgatatgaatacaggtgaattcaatgttttgtctttgtgcttggccgtatgatttattttttctgcaaaaaaaactttcataaataccagaaagttttttcaatgagtaaaaaatgaagtaggctccatgtcccagagaaaaccacactgacaaaaaaaattcttcctcaagagaatgtaaactcggtggctcacacctgtaatcccagcactttgggaggctgaggcgggcggatcacgaggtcaggagatcaagaccatcctggctaacatggtgaaaccccatctctaccaaaaatacaaaaaattagctgggcatggtggtaggcgcctgtaatcccagctacttgggaggctgaggcaagagaatggcgtgaacccgggaggtggagcttgcagtgagcggagatcgcgccactgcactccagcctgggaaacagagcgagactccgtctcagaaaaaaaaaaaaaaaaacaagagaacataaactgaactttgtatctgttttctgtggatgcagaaagtaagaagaacgctctctggcagtcagtactgatgaactgagtgcatcctgtgtatatatgttgtgtgtagaaaaataaatcacaaactcacacgctcataaaaaaaacaactcagtaaatgaaaaatgacagttcacagaccaaagtatgtggaataatcccaattatggtttgagactgtcttgctctgtcatccaggctgggtgcagtggcatgatctcagctcactgcaacctctacctcctgggttcaagcaagtctcctgcctcagcctccagagtagctgggattacaggcatgagctaccacgcccagcaggaaaagttttccaagtaccttccatctatatatattgatctttgtataaatattgtattgtactactgaacattacaaaacaagaaaaaaaattctaaaatcctatgataaaaatgaaaaacagggctggctgcagtggctcatgcctgtaatcccagcactttgagaggctgaggtgggctaattgctggagcccaggagttcgagaccagcctgggcaaatggtaacaccccctctctctacaaaaaatacaaaaattagccaggtatggtgacgcatgcctgtggtcccagctacttgggaggctggggtgggaagatcacctgagcctgaggggtcaaggctacagtgagctgtgatggcaccactgcaccgtagtctgggtaagagagtataagactctgtctcaaaaaaataaaaataaaaataaataagaaaacaaaatgaaaaatagcatttctcacacaattagctaatatctcaaaataacatatacttggggtaaggaacactgagaattatagatttaaacttaaatttcttttttttttccttttgagaggagtctccctctgtcacccaggttggagtgcagtgacgcgatctcagctcacttcaacctccacctgccgggttcaagctattcttctgcctcagcctcctgagtagctgggattacaggtgcccgccaccacccccggctaatttttttttttttttttgtatttttagtagagacggggtttcaccatgttggtcaggctggtctcaaactcctgatctcgtgatctgcccgcctcggcctcccaaagtgctgggattacaggcgtgagccaccacacccagcctaaacttaaattttaaatcatcatacctgttattcagctacaaagaggaataaagtacatacacctgctacaaccggaagaaccttgcaaatactctgctaaacggaagaccggccagacacaaaaggtcacatattgtttgattctatttataggcaatgttcagaataggcaaatccagagacagaaagtagactgacagctggggggatagagcaggggggtttgggaactcaagggatgtgggctttctttttagggttgataaaaatgttctaaaattagacagtaccaatgtttgcacagtattgtgaacatattaaaaactacagaatcatatgcttaaaagagcaaattttatggtttttaaattgtatcccctttttccattaaaagtactagtaaattgccaggcgtggtggttcaagcctgtaatcccagcactttgggaggccgaggcaggcagatcatctgaaatcaggagttcgaggccagcctggccaacatggtgaaaccccgtctctaccaaaaatacaaaaaaaaaattagccaggtgtgttggcacatgcctgtgatcccagctactcgggaggctgaggcaggagaatctcttgaacccgggaggcagagtttgtggtaagccaagatagcaccactacactccaggatggggcgacagagtgagacttcgtctcaaaaaaaaaaaaaaaaagtaccagtaaatgaataacccaggggaaaaaccatcacaagtccttagctggttatagttttctctcctaatgtgttggccattttcttactgtttacttggccttgtattaataatctgaagctttcctgcaggaatcttttaaaaccacctgctctctttatgagtccagtttagttcaaccacatccttagaacaagtcacctggacactcataaactgcggcctacatttcaacactgggaaaataaacaactgtggaattccagccccttccgcaggacacctcaaggaccggacctgacaagtacctgtctgatacatggagtgagggcccctgggtcaacctcaatagtattagtaagattttaattttgcattaattttggagatggaactgaaatgtaaagagtcgcttcctgtaccccagtgggtcatcttgcaaactcttccttggagtccacaggtttagatacccatgctctgaacagggatgaacctcagtttcacagcagctgttctccaatgctactgtactctggaaacacctggttcacctgttaaaactgcaggtctgggcaccactccttgtgctcctgactctggcccaagtgatctagcccaggggttccaaaggctgtactttacgaaacactgggccaggcatggtgactcacgtctgtaatcccagcactttgggaagccaaggcggacagatcacctgaggtcaggagtttgagaccagccaggccaacatggtgaaaccccgtctctactaaaaatataaaaattagccgggcgtggtggcaggtgcctgtaatcccagctactaggaaggctgaggcagagaattgcttgaacccgggaggtggaggttgcagtgagccgagatcgcacccctgtacctcagcctgggcaacagagtgagactgtgtcttaaaaaaaaaaaaaaaagaaagaaagaaaaagaagaaagaaccactggtataagaaccccttacgaagctctaaggtgggaggcgtgactgcagtgggagcaggggtgatgtgcatatttgggatggttccacagctgcaaatttactaaagtcaccacactgtgtattcaacatggctgaactttcaggtatgtaaatcatccctcgataaaactggttttaaaaaagcatgcaaaagcttccatatgtcccatcacacacgtggtcctgtgcttatgccaggatgtttagacatcacgagagaaagatgcacacactctcacttgggtagatctgtactggaattgtgagttcaccccagcctcgcacagctaaccctaaccccacaacacacagctgtgtcagactcaaggccgggatgggcaaactgatttatgagcttcccctaaggaaggagtatgaggtgaggttcacggtaagaagtgtggttttctgaatttcaacactttacaaagagtgttatctgtgctaagccaaaaatgaaccataaaagctaaaatacacaaatatcctgagaggggacggcttccgtaaacaccaggagctcttaaaaataccagcaacatggcatgggtgtaactcccaccggatgtacacaccaccacctgtgaagctgtctaatataaccatcaagagtcaacacgactgagaaggggctgcgagtgatacagacatgtagctgggtgctgatatgcatgacaatccaatcaatgagccccccaagaaggagcctggtgggcatttggggttggtggctccgagggaagggtctaatttgagacacagaaataaggcagctcaccctgcctggaaggctgaaacatgggaaaggggaggggatgaagaccaaggctagatcccactgcaagtctcagactccaccacagagctgatggtaccgagaggctcctgagaggacagcaagaaggaaagccgggcagctactgtgcagggggtcacggcagacaggcgaggaagggggtcaccttgctgagtgagtgagaagggatgaagacaaaaggccaaaggtggctgggcgcagtgcatcatgcctgtaatcccaacactttgggaagcctttgggaggtgaggcgatcacttgagcccaggagttcaagtccagcctgggcaacacagtgagacctcgtctctataaaaaataaaccaaattagccaggtgtggtggtgcatacccagtgcacacttgtagtccgagctacttgggaggctgagatgggaggattgcttgagcccagaagtttgaggctgcagtgagctgtgattgcaccactgcactccagcctgggtgacagagtgagaccctgttacaaaagaaggaagggaggtgggggggggggggggcggaagggctgggagtgggcgaggggctgggggaggggagggagggtaaggaaaggaagggaagaaagggagaaggaaaaaaaaaaaaaaggccgaaggggtgatctagtgatcgggtgggagcaggtactggagaaggggcagtggctgtcagctggggtgacgagggtaccaggatggagggcgtggtgtgcactaagacaagcagccctgggagagaataggtttaggagatgagggaagaaagtcaggaggggtcccaggtacagcatccttatgagccacatgcagcaatgccaaacattcggctacgttataatccaaagctccaggtcaggcctagagatggagatggagacagagccatcagcatccacagagcgatggaagcagggtgaggggccatccggggaacaacataacagagtccagcaccgagccccagagacaccaaccccaaatcaccacacagaggaagacggtcaaagagacagaaaggaaacgggggctgtgcggctcatcctccctgtccagggaagttcctcgtgatttcttaatagtgctaaagtacatctttgaaaaaggtccatggatccatttggagaccagccatgacgcctccccatggagcctggaacagcaacaagggctttgttgctggttgtagatgatgacaagaactgtgtcaagtcagctgttctaacttaacatccactcccactgtcacactgtcccctgctctgccattttcaggagacagcctggaaatccagcccactgacaaatgttccagaaaattaaatgtcagttatgaccgtatcaagaagtattcagggattctgcctttaacctgtatacagagataattcattcatatttcttactggtcttctgactatgggaatgttctctatttcgacgaatttaagcaaaatatgacctccttattctcttgttatctccaaacaagtgctgcaacatggagctggtctaacgcggtctggctcagccttggatgtgcctcagaattagcaaggggtgtgtttgtcttacttttaaaacccaaagccacgccctgccctaagtcttaatgagtaagaatctccagggtatcaagcccaaataaatgtctcgtttttgttctgtgttgttttgaaactccaccagcaattctgacacacagccaagatggggacccaccggtctaacactttaggaatattaggatatttgccagtaatactttctctgaaaagtgactggttttgggaaacttggtaggaaaaataaaggtaggaacagataaactgcaagttatctctgatgaactaatttcttcctcgtgattgttgagttgaatgtagatgagaaactaaaggtaatcagtaacgtcatgattatttcacaagcagaccatttgttattggtgctccgggtcatagccagggaaagggaaaacatcaacgtggtcgtaaacttgaagtataatcaaccagcaggttccttctggttctatttattgggcatataattttctcacaggtttttcctaatgtccatcagcacttcagcagagcagattagccctgaagatagggaagatggggaaggaccccaaatgcaattttattcaaagtgtaaaggaagtgtgggtgtcatgggtatagaagggaggtattggggagtgactgctgatgggtagagggcttctttttggggtaaacataaaatcgattgcagtgacagttgctcaactctgaatatgcttaaaaaaaaacaatgaattgtactcttgaaatgggtgaattgtacggtattgtgaattacatctcaatatagctgttaaaaaaaaaaagtcaaagaattgttttgggtgttgaaatggaaggctttacctgggtgtaaatgctgaaaatgtggctttgtacttcgtccattgagtcgaggccgtaggctactgttccgagatggagccgtttgaaaatcatctcgttctgggtaagagtgcctaaaacacaagacaaatgagtggccggcctgtctctcaggatgtttgttattattaacagtaatgacagctgccatctttggagagtttgccctatgtcacacactgcagtcagtactgtccctgctggggaagacacctgcagcattttgcctgcctagaatcccattccccttttgaaaatggcttcctagctttcccaggggaaattaaccacaccatgcccattacctaaggtggcccaagaggactgtcaatcaggggcctggcccattccgttggccaagagggtgacaaatgacatacactagagcaatcagattctatctcgaaggattctgacccttgagtagaaagatacatccctaatggcagagccctacagagaccacctggagggtcctaatgctgacttaaccagaactttcctggtggctctccttccagaaacctcatttttctctgatttggtgagccgcccaggatctttgcattagcttcccttctaccccatggacattaagcagtagagatgaggctgaaaccagatcttccccctcccaatccttgctcttcaccactctgatagcctaatgcctggacaagcattaagttgtgtagcagtatcagggtgtggtcagagatcaggcctgactgcctgagttaaagcttgcttcggctactatgcgcccgtgacaagtcacttaccctctctgggccacatttcctcatctgtggaagcgggacagaaacactacctaactcacaaggttcaggtgaggactgaaggagtgaccgcactgaaactccccagaattgtattctgcacataattctgttatcatcatcttcatcaccaaagaatcttcatcaaaagatgaagggaataaaatagcagcaacacgcatctctcatatgtccagagagagcccaagaatttcagccaaagccctcaggcatcttctctcaccaggaatcctgcgcaggtcccagaaagcagctcacctgtcttgtctgtgagtaagtacgaaatcctgcccagctgctcaggaatcgtgctggagcgaaccacggtcccggggattttcgagtcccttcgaatcacccagctgtacacgatcttgcccatgtccaggttcacacgcaaactaggcacaaaaccagagcaaacaggctaacaggacagatgtaaggctccttgtatctttataaaaacatggactctaaacacatgtgccatcgcatccggactcactccctgcagaagcacactgccagagctgaacgcacagactcagcaagagccagcaccaccgtcaagtcacacacggaacaaatccattattgtcacaaagctcatgttatggactgaagtcacttaaaatacagaaagggtagtggtttccatctcaccttttagaaaaattactgatcccttaagctaatatatttttgatgctatattcatttttttaattgtggtaaaatatacataacaggaaattgaccattctatagtactgagcacatttacaatgttatcagccatcagcatcatccacctccgtaattctttcatcttcccaaactgaaattccacacccattcaacaataacgccccatcccccaccaaccctagccctggcagcccctggcaaccagcactctacttacatttctatgaatttgactacttttttttttttgagacgaagtctcactctgttgttcaggctggagtgcagtggtgctatttcagctcaccacaacctttgcctcccgggttcaaacgattctcacacctcagcctccagagtagatgggattacaggtgtgtgccaccacgccgggctaattttttgtatttttagtagagatggggtttcaccatgttgcccaggctggtctcaaactcctgggctcaagtgatccacccgtcttggcctcccaaagtgctgggactacagacgtgagccaccacgcctggccggaatttaactaccttagacactgcatgtaagttgaatcatacactttttctgacttttgggggggcttatttttctggcttattttgcttagcataacgttctcaaggttcatccacactgtaaggtgcattagaatttccttccttttgaaggctgaagagtattccattgtatgtattatactcattttgaaatttaattttactgcacaaagtaaatagaagtcttcacattaattcatcatcctataaactaatcaaactgcttgccattttactggctagccctgggacaaatgaagagtcgactcaccaatttttaatcatgttacatgtagaactttgaaggctaccacgtcacttagattgaatacttgttttgctagcagtcaagtcactaaagtggatgtatttatcctctgaatccaccatccagagcatgctgacttgggcacagtccccctgtccctgtcacactgttttacacaaaacgacaatctctgtccccagaaaaagacaaattctcaccaagatgatctaaatatataaaatagcaagacaaaatataagataatatatcaagtataagacagagtataagcactaaaagtttcagggaaaaaatatgtaatttaatatttactaattatcatggggaaaaagtagaagcaaacagaacaatatgggggaaagtagactgctaacccacatcacagagcagctctaaaaaatgatgggacacacatacaagtgatgtgaaaagttattcaaaacactgctccaattttttgtaaaggcagattttagtagaccaaactcccctttttctaaaatcaaaagcactctagaaaaaagtatatcccatactattaacaatgattatcacttggtagtgagagcagaggtgatttatattttattcttttgctaatacaggccttcacttttttctactatgaaaatctattatttatatcactttaaaaaaccaggccaggtgcagtagctcacgcctgtaaccccagcactttgggaagctgaggcgggtggatcacttgaggtcaggagttccagaccagcctggccaacatggtgaaaccccaactctactaaaaatacaaaaattagccaagcgtggtggcaggagcctataattccagctactcaggaggctgaggcaggagaatcacttgaacccaggaggtggaggctgcagtgagctgagatcgcaccactgcactccagcctgggcgacagagcaagactccatctcaaaaataaataaataaataaataaccatttattcaacctccaaatcaggtaggcaaaggactggcatgtgccaccaagctttcattgcacacctacagcagacactgctgtcaatcacaacaccatttccctttgagcccagatgcaggctcaaaatccttctcaacacagcagtcccaacagccactatcaaccttgcagagctggctgatgacaggagctctaaatggcatccctagcatagggaggcaaggcaaggaaagatctctgattcaagaaaggatggcttgtggaggaatgtgatcttctggtgctagagcctcagtgtggttcacactcctgactgattgctcttggtcctcactctacaaagagatctgctccttctaaaagccgatgggcgcggtggctcacacctacaatcccagtaccttgggaggctgagtcaggtagatcacctgaggtcaggagttcaagacaagcctggcaaacatggtgaaaccccatctttactaaaaatacaaaaattagccaggcatggtggtgcatgcctgtaatcccagctacttaggaggctgagacgggagaatcacttgaacctgggaggtggaggttgcagtgagccaagatcgcgccactgccctccagcctgggcaacaagagcaaaactccatctcagaaaacaataataataataaaagccacagaaccatcatctttgaatgagtaaagagaagaagatgtcacggcagccaaactcaagctcgtcgcctgcttacctaatggggatgatgttggaaaacaagaggaggaagcggatgatctgcaggtaccaacggcctgcaaagtgctgaagggcaaccatgaccagcgagaccaccaccagggcaccaaagaggatcttggtgaggcagttcacttccaagtcgaacaggccgatctgtgggacgaagcacaaaccagggcttgagatgagctggtgtaactaatctcaaacctaaaccaggaggtggaggctgcagtgagctgagcctcactgcactaactcagcctgccggagagctggtccttcccctacaaacacctctaccccaggtaggacagtgggatccatcgatcctcatatctttggtctaagaacactgcttccatgggctggtgttcataacaggcatccaagggaactcaaagaattctgaaaactcaaaaaaatgtttacaactaaagaagatttacacttggaaatgtatcagcgagttactgctgtgctggctgggtcgtgtgctgaatagcctccaccaccctgcagagtgcccttggccttgtaaaacaactcagatcctaaactctcagcaccctacccaacaccaactcggcagtgcctgaaagtctggggcgcacaccagtggtggcacccgatttttaggtggtgcattaatggacattattttattatttatttatttagagatggagtctcgctttgtcacccaggctggaatgcaagggcacaatcttggctcacacctcctgggttcaagcgattctcctacctcagcctcccgataagctgggattatggcgcccgccaccacacccagctaatttttgtatttttagtagagacggagtttcgccatgttggccaggctggtctcaatctcctggcctcaggtgatccacctgcctcggcctcccaaagtgctgggattacaggtgtgagccaccgtgcccggccctggacattattattttaataataatacatttatcttcatgtctagtcttttaaaaagtaacaaatcatatccataacttcatagaaacatgccccaggataaggctaaaacattaaacaaacgattttatagttgtaatgatggctgtaacgtctaatggtggagcgaccatgactgaagtttaggagacacagcattccttcctgctactgacaaaagacaattattctgtaatgttctgactcttaaaaattggaggaggggtaagctgtgatggtgggtcacggtttgaatcacatgggcctgccccgtcctcactgtgtagcctggacagggcacggtgcttcctgaagccgtttctcatggataaaggaagcatgcactcacagggctgttatgaagatgaaatgagatgcacgtgaagggtgaaacacaaggcgtgcaaaccgtacgtgctccacagtttaacctaaaagcacaaaaaatgctgggcgccatggctcacgcctgtaatcccagcactttgggaggccgaggagggaggatcacttgatgtccggagcttgagaccagcctggccaacatggtgaaaccccatctctactaaaaatacaaaaattagccaggcatggtggtacacgcctatagtcccagctactcaggaggtggagttgggaggattgcttgagcccgggaggcagaggttacagtgagccaaaatcaagccactgtattcctgcctgagcaacaaagtgagaccctgtctcaaaaaaagaaaaaaaaaaaaaaggcacaaaaaagtcatatatccacaaacatgtaactacatatttacgtactgtattatatatgtgtattgtatatgtatttattgcatacacacacacacatatgcataaaaagataaaatgtctgtataaatatcactcttaggtgttcctattttaatatctcgtcactcacccaccagaaccaaccagcccacagccggtcaatgtaccccatgacctcgtacacaccttacttcggggatttgaggtattcatgacactccggagttctctgccagtgtaaagaacaacacccacaacagtacctaaaatggaaaaaagaaaaaaaaaaaaagaaaagaaatattaatacagacaggcaggcttgcaaatagaagagtctgatcctcttgagagactgggttcttttttttttttgagacagagtcttgctctgttgctcatgctggagtctggagtgcagtggcacaacatgggctaactgaaagcttcccaccatgttcaagcgattctcctgccttagcctcctcaataactgggattataggcgtgcaccaccatgcctggctaacttttgggtttgttttgttttgaggcggagttttactcttgttccccaggctggaatgcaatggcgtgatctccgcttactgcaacctctacctcctgggttcaagcaattatcctgcctcagcctccggagtagcttggattacaggcacctgccaccacacccggctaatttttgtatttttagtagatacggggtttcaccatgtaggccaggctggtcttgaactcctgatttcaactgatccatctgcctcagcctcccagagtgctgggattacaggcatgagccaccacgcccaacctcaatttttgtatttttagttgagatggggtttcaccacgttggccaggctggtcttgaactcctgacttcaactgatccatctgcctcggcctcccaaagttctgggattacaggcatgagccaccacgcccagtctcttttttttttttttttttttttttttttgagagagggtcttactctgttgcccaggctagagtgcagtggcacaatcatattaatagctcactgcagcctcaacatcctgggctcaagcgatcctcccacttcagcctcccgagtagctgggaccacaggcacatgccaccatgcttggctaatttttgttttttttgtagaaatgaggtctcactatgttgcccaggctggtcttgaattcctggattcaagtgatcctcccaccttggcctcccaaagtgcttggattacaggcatgagccacctcgcccaacccaacagccacactatgagaacatcaaaggttttacattagggccaaaccaatgatctgcggctacactgaccaaaagaacagtcactaaccactgaaaaccctttgagtttaaattcagttaaattaaatacagcgcccaccctccctagccctgtttcatggccatataagctagtagctacctcatggaacagagaagacccagagccttctccttttaccacaaaacttgtactggtgaatgctggtctacggggcccagcggcttctaatggaaggtgactggggaaaggcgtggcttgccgtttgtgcctctggtcatacaggcttccagaggtgcctagaacattcctaccttcattaactattatggaaacttggaaacagatgcttctttttagagcacattcttcctgctaaacctgatccctttcagtctaacttgcccatttggggatgtctgtcccaaggacaactctttcctaagaactcccccaccccttctatcctccagacacagtaagaaaaggcatgaatccttcgaaagtcaacaatttactcaagaaatcaacatggccagtgaacaagaggaaaatgctcaatctagtaaataatcaaaaaatgcaaaatcatttttatcccaattagattggcaaaaatcctgtggtacacactgctggctgacgtgcacactggtgtgatctattttggagagaaatttggcagtatctgtcaaaattttacttctctccccttctcagtgtgtgccaagaaaatcaacacagcaggaaagatagacagtaaagaaggaaaccaagaaacacggcatcacagggagtgagtggcgctaggctgaaagtcaagtcaagcggagaaacatacaggactgggtggcagggcggggggaagggggcagtggggggcaggcagtttgtactgtctccattcacatcatctgagccaaaacttggaacacgaaggagccagccctgccaagctctcagggaagatcccaggaatacaagcaatttggtctctgccagaaagagaaaacacctctttctctgtgctctctccccctcactctcaggaatgccactgtcaggagatacaaaaatccgaagaggctgaagcacatctgcagtaaagagcccgcccccaaatgcactgaagggaccacgtcctggacaaagagccctaggaggaggcgctgaagtccttcaagggtctaacacactcagccaggcaaacaatgttctccagcacaatgcagttcccttccaaggaggctcccggcagatggcaggccagggagagcttgcggtggcttctcggcagatggcaggctcctgtgaacacaggcagccctcccttcaggcccctgtcaccacagcagatggctggacagtgggaaccgagcccgggctgagcttggaatgaccacacgaccgctgcatccactcctatgcagatgcagctcagcctcaatccccagagcccagggtcagagagggccccagtaacaagggggaccccaaagggagtgccctctacgtctggcctggctaacctcgatgccatcaaatgctgctgaaaatggcctttcccatcccatgccttcttgtgctcaggacacaggctctgcctccacaagatccaaaccccagcctcatcctcagtgagaccaccaaccggagaggacgcacacaccggatgcgccttggcttggtctgcacggtgccttcaaggttctgaataactggccacttttaaattcaggagcttgcctatctaaaaaaaaaaatgaggccgggcacggtggctcatgcctgtaatcccatcactttgggaggccgagacaggcagatcacctgaggtcaggagtttgagaccagcctggccaacatggcgaaaccccatctctactaaaaatataaaaatcagccgggcatggtggctcatgcctgtaatcccagccacttgggagactgaggcaggagaactgcttgaacctgggaggcggaggttgcagtgagccgagatcacgccactgtactccagcctgggtgacggagtgacactctgtcaagaaaaacaaaattctaaaaaaagagatctctggcttttcctggaagtgtggaagatctgatgacactgagtccacgttcctcatgctacacccagggagtgctgaggaacaaccacctcttagacaggcacgtgctctgagctcaccatggtccccatccaccactatccactcctttaaatcctctgcccaatttgtaactgttgacccgaaagtatccacccccaggcctctgatcccctccttcccctgctgtcacctctgcagcccctccttgctctcaaggttctcttcactcccaccctctgcagcctgcaggccacgcagccctttccattctcccagccagtgtccatctggtttctccaaaaggccaagaggtcatggtcaggcatttcacggagttctaactgactctctggaacagtgtggtgctgcctggggtcagggctattctgtgacccctttgttcctcatccacaacaaaataaatgctgaacccgagaatcagcgtttggaaatttttatagcaattaagtattgctgcaatattcgagcatgtgatcagagtagtcgtctcatcaaatggggtatagaccatggaggcactatcaaactgttgtgggctgagcacggtggctcacgcctgtattcccagcactttgggaggctgaggcgggtggatcacttgaggtcagaagttcgagaccagcctggccaacatggtgaaatcccgtctccactaaaaatataaaaattatacaggcgtggtgatgggcacctgtaatcccagctactggggaggccgacgcagaagaatagcttgaacccaggaggtggaggttgcagtgagccaagatcgcaccactgcacgccagcctgagcgacagtgagactgtcttaaaaaaaaaaaaaaaaaaaaacttgtggcaaggtgcacatagtgtggctgcatattactcatgcacagaggcaggaccacaaatcgatcttctacacattaggggaaaacccaacaaactggtccctctccactaaaagtttgagaagaactgggctagagcaccagttcttctcaccttctaagaggtggctgttcctcaacctgggctctgtaacatccaggccaccttctctgccaagctcctggtcctcctccatccctccccttatccttcactcttgtgctgcctcagccttgcagccctgcattggctaccatggcaaccacatcttctacagattaatgccagctgatacagacggacctcagcactgcctggcaagcttttttattttttttcaacttccaacagataatagcagacctgttaaccgagaggcaagagttacagcctatagggaacacagaagtgaaatctcacataattaagatgactcttgctggctgttcctggcgttgagaactagaaggaaatggcttgggtttacattagaatcagagggcaattagatgtctactcagtgagatgcaggggaaactgaggccaattaaggaagcagtcaatgcccagctgctcatactgactccaaatcatacacccactaagaggcagggcaggcaatgccatcagatcactgctgtgctctccctcccctaccgcacccctccccccaaaataaccgagcacacagagaggaattcagacaagtgaaaatgtatctttaactccacaaggcatctcccatgaactgtctgaaatatctttcttcttcaagatgccaatatgccttccactctcctcctcccaggagatgacctctccaaggcatgtaaccttgaacaagttgcttaacctgagactcagtgcctcatcccattaaatgtcctcatgtaatgttatgagaccaagttaagagaatggcagcaaaacacttcatcaattaaaagtaagtgataagtgaagacttaattagtattgctcatctctgagactaagactgacaagcccttccaacattgctccttccacctcagatttctctgcatttgcagctcagctcaactgttttcctttttactgattttggaggaaatacataaaactctctcccatttcctctatagcccatcctaaatttctttttttttttttttgaggagtctcactttgtcgcccaggctggagtgcagtggtgcaatttcggctcattacaacctccgcctcccaggttcaagcaattctcctgcctcagcctcccaagtaactgggactacaggtgcacgctaccacacccagctcatttttgtatttttagtagagatggggtttcaccatgttggtcaagctggtctcgaactcctgacctcaaatgatccactcgcctcagcctcccaaagtgctgggattacaggcgtgagccaccgcgcccagcctccatccgaaacttctaataaactataaatcccatgttgtgggcacatgcatctgtctcctaaggcactaccacagtgctgggaccggcaacggacctcagcaccgaacaggtgcgctcttgctgcatgaaaaggaggacggaaggagagaagaaaatcaccagatgaaaaacaaacaggcatatgaaaatgcatttattactgaaatgctaacattttcagtagccaaggtggtggttacccttgggcaggtgtggggcagctagaagggagtggagggagcttcttcgggggtggacggtgataatatcctgtttcttgatctgggtgctagtcacacaaatgtgttacctgtgttaaaatccatcaagcatagggtggaaggagggtgaggatcagaaaacactacctattgggtactatgcttactgcccgggtgacaatatcatctgtacactaaacccccgcagcatgcaatttacccgtgtagcaaatctgcacatgtacccccaaacctaaaataaagttggaaagaaaaaaatataaatccaccaagcactatgtttaggattttctgtgtacgtactatccttccacagaaggcttagaaaagaagaatggtgaaccgtccacaaaaaatgaagtacgtcctattcacgtggctgtctagtaaggagatgagcacatgacaggtagtcatgaacttccagccctgcctatgccagatgcaacgggacatgacaactttaaccccatcttgttctcattgcctttaacgcctctttattccacccaaagagacaagcatttgacccagacatcctctgctctaaagtgtgttgcttttcactgtatcttttttttttttttttttttttttttttttgagacagagtttccctcttgtggcccaggtttggggtgcaatggtgcaatcttggctcactgcaacttctgcctcccaggttcaagtgattctcctgcctcagcctcctgagtaactgagattacaggcacgcaccaccacacccggctaattttttgtatttttagtagaggcggggttttaccatgttggccaggctgatctcaaactcctgacctcaggtgatccagccgcattggcctcccaaagtgctgggattacaggcctgagtcaccgcattcaagaccagcctgaccaacatggtaaaacctcatctttactaaaaatacaaaaaattagccgggtgtggtggtgcatgcctgtaatcccagctactcagaaggctgaggcaggagaatcgcttgaacccaggaggtggaggttgcaatgagcagagatcgcaccattgcactccagcgtggggacaagagcaaaactttgtctcaaaaaaaaaataataataaacagcgtctttctctgtcacccaaactggagtacactggtgatcacagctgactgcagccttgacctccaagctcaagcaatcctcccacctcagcttcctgtatagctaggaccaaaggcacacaacacaacacctggacgtttgtttgtttgtttgtttttattttttttgagacggagtctcgctctgtcgcccaggctggagtgcagtggtgctatctcagctcactgcaacctccacctcccaggttcaaacgattctcctgcctcagcctcctgagcagctgggattacaggcgcccaccaccacgcccagctgattattattattattattattattttatatttttagtagagacggggttcaccgtgttagccaggatggtctcgatctcctgacattgtgatccacccgcctcagcctcccaaagtgctgggattataggcgtgagccacctcacctggccatgtttttattttttgtagagatgggttttcactatgttgcctaggctggtctcaaactcctggactcaagcaatcctcctgccttggtctcccaaagtgctaggattacaggtgtgagctactgcacccagcctcgttttacactttcattccccataaggctgcttgttcacacggggccagaaacacagactgggcctaagagtctggagcctggagtctgacctgaggtaatattcccttgcctgttagttctcctaactctattccttaaagcaagtattttaatgtaagactatataaacactccaaaaaaagtcagtggatatttttataattttagagcagggaaaattttcttagcatgacacaaaaaacagaaaccacaaagaaacaaaagatcccagcctgggcaacatggcaaaaccctgtctctacaaaaaatacaaaaacttagccaggcatggtgaggtgcgcctatagtcgcagctactcagaaggctgaggtgggagaatcatttgaacccaggaggtcgaggctgcagtgagccctgatcatgtctctgcacaacaacctgggtgacagatcaagaccctgtcttgaaatgaaaaaagatcaacaggtctgactagataaaaactgcaaactttagttccaaaaaacaaatgagaccaagtgaaacagtcattgcaattaaggcaacaaataaaatattaatattcttatgacataaacaattcttacaaattattttttaaaaaccaacctataagcagaaataatgggcacaggacacaaagtggtcattcacacatatatttaagaaaatacggccaggcgcggtggctcatgcctgtaatcccagcactttgggaggctgaggcgggtggatcacgaggtcaggcgattgagaccatcctggctaacacggtgaaactccatctctactaaaaatacaaaaaattagccaggcgcggtgccaggcacctgtagtcccagccactggggaggctgaggcaggagaatggcgtgaacccgggaggcggagcttgcagtgagccgagatcgcaccgctgcactccagcctgggtgaaacagtgagactctgtctcaaaaaaaaaaaaaaaaaaggaaagaaaatacaggcctgggcgcggtggctcacgcctgtaatcccagcactttggtaggctgagacaggtgggtcacgaggtcaggagatcgagaccatcctggctaacaaggtgaaaccccgtctctactaaaaacacaaaaaaattagcctggcgtagtggcaggcgcctgtagtcccggctactagggaggctgaggcaggagaatggcatgaacccaggaggcggagcttgcagtgagccaagattgtgccactgacctctagcccggaccactgagcgagactccatctccaaaaataaaaaaaaaaaaaaaaaaaaaaatacaaataaatagtaaacataaaggaagatgtctgcacaaataatttttctaaaggcaaatcaatatgctaaaatttgttcaatgtctatcacatgggcaaaaattagaaagccaaacacactgctggctagatacacatgtaagttaagtttatcaggagcatgaagaagaagaggcaagtttcctgggtgaatcgaaacataaaatgtatatggccttccaacagccatcctgtttttatgaaaacataggcacacgcctgtaatcccagcactttaagagactgaggcgggtggatcatgaggtcaggagtttgagaccagcctggacaacatgatgaaaccccaactctactaaaaatccaaaaaaagttagctgggcgtgttggcgggcccctataatcccagctactcgggaggctgaggcaggagaatcacttcaacctgggaaggtggaggttgcagtgagccaagatcacaacactgcactccagcctgggaaacaagaacaagactcagtctcagaaaaaaaagaaaagaaaaaagaaaagaaaagaaaaacagacacgaaaaaatgctcatcatcactggccatcacagaaatgcaaatcaaaaccacaatgagataccatctcacaccagttagaatggtgatcattaaaaactcaggaaacagcaggtgacggagaggatgtgcagaaacaggaacacttttacactgttggtgggactgtaaactagttaaaccattgtggaagacagtgtgttgattcctcaaggatctagaactagaaataccatttgacccagccatcccattactgggtatatacccaaaggattataaatcatgctgctataaagacacatgcacacgtatgtttattgcggcactattcacaatagcaaagacttggaaccaacccaaatgtccatcaatgatagactggattaagaaaacgaatagaatactatgcatagaattctatgcagccataaaaaaggatgagttcatgccctttgtagggacatggatgaagctggaaaccatcattctcagcaaactatcgcaaggacggaaaaccaaacatggcatgttctcactcataggtgggaaatgaacagtaagaacacttggacacagggtggggaacatcacacaccggggcctgtcgtggcgtgggggagtggggagggatagcattaggagatatacctaatgtacatgacgagttaatgggtgcagcacaccaacatggcacatgtatacaaatgtaacaaacctgcacgttgtgcacatgtaccctagaacttaaagtataattaaaaaaaaaaagaaaatgtaggcaataaaaaattttaaatttctatatggtaaaagaaaataaagcccatcacaaacaaaaacaaaaaacaaacaaaaaactgcaaaaatatgtataacccacaaaaagtgaaagtttgatattctttcctctataaagcattctaacaaagtaatgagaaaaagaagaaccacaaaggaaagtagatagaccagaatattaagaattagctgacaggtagaaagacattcaactatatttgcaattaaatcaaaattaaaacagtaggctgggtgcggtggctcatgcctgtaaccccagcactttgggaggccgaggcaggtggatcacctgaggtcaggagttcgagaccagcctggccaacatggtgaaatcccatctttactaaaaatacaaaaattagccaggggtggttgcacatgcctgtaatcccagctactggagaggctgaggcaggagaatcacgtgaacctgggaggcggaggttgcagcgagccaagatggtaccactgcactccagcctgggccacagagggactctttttttttttttttaagccaactagtaacttacaaagaaacaaaagagacagatgcaaatatgaccacctgccaggtaatctaggaaattcaaactgaatgagataattatttttcagtcaaattatcaaagaataaaaagagtaattaattattatttgttaataaatgacttgaaagcaagaaaaaattggttcaggtgacatgggtggaaagtggcaaggaggggcaggatgtgaacgtctgcatgctgcgtcccctgggtggctgtgcccaggcgtggcccaggcatgaccgtgcagaatttctcgctctttagtcatcagggggactgagagacgtaccaaagtatgatgaaaataaaggcaggcagtggaaataaaatgtagcagaaaaaacctcaagggagagtgcacctctgcctatttgtattaagtagtgcatgtgtggatggtgacacacggtactccagggatagtttgtgctgcttcattccctctccttgccacacaggatcctaatcgagtgtctactactgtactagagagcaacaaagaaggaaaaggcaaggtggtttacacctatgatcccagcgttttggctgaagcagaaggatcacttgagtctgagagtttgagaccagcctgggcaagagtgagacccccatctctaaaaaagtatttaaaaattagctgggcctggtggcatgcacttgtagtcccagctgtttgggaggctgaggcaggaggactgcttgagcccaggagttcgaggctgcagtgagccatgattgcacccctgcactccagcctgggcaacagaatgagaccctgtctcaaaaaaaaaaaaaatgaatgaatgaatgaatgaatgaatgaaagagagaagcaaccagcagagtaaaacggcttgatggtggggagtggagaatactatgtttgaagagaggaaaaaattgattcatctaatagtaaagacagaaagtcaccagcagtagaattataatactaactatactattaagttaatgatatcacgaaatgtaagaaaagtgatggctacacagtaagttctgtttctggagcaaaatgcctaggttcaagttccaactctgcctttcacctgctgtgtgacctcagagcaagttacttaacctcactcagcctccgttccgtcatctgcagaatgagcataatatgaataatagtatctaccctcatggtgccgttaggagggttaagtgcagtgtgtaacacacataagcacccagcacagggcctgacacatgggctgcatgccgctgatgttaaccactgctatcgggggtcatattcagcccatgcagtcctgatcagtgtcatcccagcactgaaagacaccaatgggccaggtgcagtggctcacatctgtaatcccagcacttagggaggctgaggtgggtggatcacttgaggtcagaagtttgagaccagcctggccaacatggtgaaaccccatctctactaaaaatacaaaaattagccagcgtggtggtgcgggcctataatcccagctacttgggagactgagacacaagaatcgcttgaacccggggggcggaggttacagtgagccaagattgtgccactgtactccagcctaggtgacagtgtaagaccttgtctcaaaaaaagagaaaagaaaaaaaaagagaaaaagaaaaagaaaggcaccaatatccacttcctcttggtgtttaaacacagaagctccagctcaagcccatgccctttcctagggccccagtgctggcagtcccagcgcgacataccctacaaacacagcctccagccagaacatccaggctgcctccccctctggtacagattagaatgtcaatctgaacaggcaattagagctactgccagcatggacgctgcagaaaggtccacaggccacgcgggcttctcctccaggcatctctaagtgtccgagctgcaattagatgtcagtttaattccctggaggtgtcggaacaagtggaaaatgccatttgaccgagcactcatttttccaactgacagatgattattctaattacaaaaggattttctttccttttcaaattgctaccacattcctcaaaacggcgcctcacctgatgcgaccacagtgccagcccacagcgtgttctctatgctcaggctctcgctgatcggggggtcgctgtcttcctggaaaagaccaaacggacacacgttcaccccccaaagcttccccagaatccacaggctgcttctagcatggtccgctggagatagaaagacaggctccccccgatgaacctggaagcccagtttggaagccgacggctccaccatgaggggagggccaagctcttccactactgcccttggggttttcatctcccacagaaatatgtgaaaaagttggcctgtgatttaagaagcgcaggcctcttagcactgaaaaatgttttatgaggttaagaatcaaaacgtaaaagcaaaccaatcaggctgtttgcaggccagctttgtttgtggcttatagaaagagaatgtggacaatgtaatatgggttctagaaacctgttgacccatattcctaaaataatttttttttttttgagatggagtctcgctctgccacccaggctggagtgcagtggcgcgatctcggcccactgcaacctccacctcccaggttcaagcaattctcctgacctcaggagatccgctcacctcagcctcccaaaatgctgggattacaggtgtgagccaccacgccaggcctcctaaaacaaattaaatccaaattaaatttctcttctgaaaggtctggaagtggcttaaaaattatgaaaatggcagataggatttgtatgaataaaagaggacaaagtcaggtgtggtggctcacacctgtaatcccagcactttgggagatcaaggtgggtggatcacctgaggtcaggagttcaagactagcctggccaacatggtgaaaccccgtctctactaaaaatacaaaaaattagccaggcgtggtgatgcacacctggaatcccagctactcaggaagctaagacaggagaatcacttgaacccgggaggcagaggttccaatgagccgagatcgcgccactgcactccagcctaggcgacagaaggagaccgtctcaaaaaaaaaaaaaaaaaaaaaaaaaaaaaggccaggctcagtggctcatgcctgtaatcccagcactttgggaggccaaggcgggcggatcacaaggtcaggggatcaagaccatcctggctaacaccgtgaaaacccgtctctactaaaaatacaaaaaattagctgggcgcagtggcgggcgcctgtaatcccagctacttgggaggctgaggcaggagaatggcgtgaacccgggagacggagcctgcagtgagccgagatggtgccactggactccagcctgggcaacagagcaagactccatctcaaaaaaaaacaagaggacacagatccatctgaaggacagagaaagaaaaactctttcagacgccagcgttcacatgaattgcagcaaatgcttcctctaagttgtcaggtcatttaagctgttccaaggccagaagaaaattccagttgtgtcgaccttactgagaaacaatacgctggctttcaaggcggtgccttctttatgtccccacctggcatgaaacaacttcctgacaaagaactgtcagtacttcttggccttcatttcatcccttacacactcccggtgacaggatcccatgtgaaggaagctcacttactcgggtaaaagttcccacgaagttgtgaatgtcaatatttggctcttctgcgtacacatacgatcgaatctgaagaaggtcctgttcaacagaaggcacattcgggagtcaaagtcagttcacaatgcaagacttcaggaggcatccactatgtttccaaagcaactatatttcccacacacagcaaatggcccctcaaaattacaggggaggtggaaagaagaggaaagtcctctgttaagtaagttgaggagtcgcagcatacagtatctcaaagcaccctgacagactctacagtgaagaccctcgtttctctgtttactcagccctttccagacttgatggggtgatgctacacacctatgaataccctggaaagtggcagaccctcctctgctaaattctggcttgcaagacttgtttgtaccattgaaaatactcattcaggccaggtgcagtggctcatgcctgtaatcccagcactttgggaggctgaagtgggcggatcacttgaggccaggagtttgagaccagcatggccaacatgttgaagccctgtctctactaaaaatacaaaaaaattagccaggcatggtggcgcgtgcctgtaattgcggctactcaggaggctgaggcaggagaatcgcttgaacccaggaggtgaaggttgcagtaagctgagatcgcgccactgcattccagcctgggcgacagagcgagactccgtctcaaaaaagaaaagaaaatactcattcaacaaatggttactgggcatctactctgtataaacctctgggaagagctgaaaaaagtaagaacgcctcccacccgtaaggatggctgctatcaaaacaaaaacaaaaacaagtgtgaagatgtggagaatgtggaggccctgtgcactgttgctgggaacgcaagatggtgcagcagctatggaaacagcacttcctcaaaaaattaatcagaaaactaccatataatccagcaattccacctccggctatatacccaaaagaaatgaaagcagggacttgaagtgatcatctgtccacccatgtacgtagcagcattattcacaatagccaggaagtggaagcaactcaaacaagcatcagtggatgaatggataaacaaagtgtggtctgtccatacaatggaatattactcagccttaaaaaggaagaagttctgacacaggctacaatacggatgaaccttgaagacattatgctaagttaaataaaccagtcacaaaaagacaaaaactaggtgattccacttataggaggaacttagggtagtttaattcatagagacagaaaacagaaagatgcttgccaggggctgggccaaggggggaatgtagttactgcttaatgagtccagagttccagttttgaaagatgaaaaaagttccgaagatgaacacggctgatgcctgcatgacaacgtcaatgtacttcatgccactgaactgtacacttaaaaacggttaggacgatagattttatgttatgtgtattttagcacaattttttaaaaagcaaacaagaagtcaaccttaggtgataagaaagcccaaaagtgaaagatcttggcaaaaactacatttcaaagcagcatatgtgaagtggcgtaagacaggcacagtcagggggagcagcagtcactgttagaacagtgagtttctaactactgtctaggagcccctggggacttgtagcagccaccatcacgtgaagtggggctggagggggagcgtggggtcctggagagcccctgggaggtggtggctcgtgcctgtaaccccagcactttgggaagctgaggtgggtggatcaattgaggccaggagtttgagaccagcctggccaacacggtgaaaccgtgtctctactaaaaatacaaatattagccgggcgtggtggcgggtgcctgtaatcccagctactcaggaggctgaggcaggaaaattgcttgaacccaggaggtggaggttgcagtgagccaagatcatgccactgcagtccagcctgggtgacagagcaagattccgtctcataaataaataaataataaaataaaattcctggtttaaaattaacagtaataatggtgttatttcactttttattatccatgaaaaatcattcatagggtggctacatttcttgttacgtcaatcccgccaagacatggaactttcctcctccctcaggggacacagtaaggagtggcttcgatccatgtgacgtgagcacaggggaagcttctgtgttccacttcatccttccagaccacagtggggcatgccactcaccaggcacttaagttacacatggccaactactgcggccatcctctcagccagggcctgcgccccatcatacacactggggatacggcagagaatacaacaggaagaacccacccgcagggatgctgcctggaagtgagtgaagcagggatgcagggagaggtgggcagaaagagcctctccgataaggagaatcgtgagcaaaagctcagtggagtgcggagatgccctgccaggcagactcgccagggatcagagggctcccagtggaggaaatggcaacagtaaacatccagggacagaatgacagacccgacaggctggtaggcagaggagagagggccaggcactgaggtcggagcctctgcagagagacaaatgggaaggagctgaagacgacagcaagcaccgcagaactgattctcagtaagatgagaaatctttggagggttgttttttttttattttatggttattacttttattagatacaggtgtcactatgctgcccaggctggagtgcagttgctattcccaggcacaatcatggctcactgcagcctcgaacccgcaggcttaagcaatcctcccgactcagcctcttgaggagcggggactacaggtgcatgccgctgagcctggcctaccttcgtaggttttgagcagaggaatggcatgctctggcttaccttttcaattttggtgaggccccttggcaaggctccttatggtttttagcttcccgcaggagagctcactccctgcactcggggtctgctttggtcacgtcaggaaagccaactaggcccaggggctctccaggaccccacgctcccctactggccccacttcacaagttgccatcccatgcctggccccccaggtatgagtttgagaaccctgctaagataggttgcccgcatgggcttctgcagggaaagctactcacggcggccgtggggagcctctgcgtgcaggccacgggaagccgcagcttccagtccgtctccccatccagctgatccgtccgcaagaagcatgaccctgtggaaggaagtcgggtgccgtcacctgcacctcaagcacccttcccttggcagctctgggcagcgtctgctctggtccttgtaaaaacagccaaccaatggccagcgaccacaagagaaaatacatatcctatctcctacttcttccataataagctctggggtcaaaaagctcagagttcaaatcctcactccgccactccctctgagtgggatccccagctagtttcttggacttgtcaagctttagtgtctgtaaaacgtggagaaacgcagacttcgcaagcttgctgtaaagattcaatggggagatagaacggggacgagcacaggttgaccagcattccgagccgtctggccaggcatcgccagcaccttctcaggacccaaaccacctgagtgcaggtccaggctctgccacgtaatagctttgtgccctgagagttgcctatcctctctgagcctcagtttcctcgtgtgtaaaagtggagataggaacagcactgaccctgtagagatgttgtgacaattaaagagctgattcgtgcgcagagttcagaacaggactgatcgatccaggcaagcactaggtcattatgggctggcacatttcagaggtgtatctttcagtctgacatacagatccgtgcaagtagtcagctgtatactccatcagatacagaacataccccattcactgccactgcagttcagtctttgagaactattaatgtagaacactcataattttggtttgtttgtttgttttttcaagaaaaaaagagcatgtcaggggccctactccataatgctctgttttcactaaataggacacaagaacgaatttaaagacaaagctgcagtttttcaaaggctgttttaatctagtgccttttatctcctgtcctgattacatattagtataaaattttacttgtactttaattctattcataatgaaatacgttgcagcatcctcaaaggaatacgaatgtaaatttttcatgtattcaaaaaacctccgatcatgccagataagggaaaaacagccttatttcctcagaacagcttaaataacaaaaattaaaactaaggccattttggccaggcgtggtggctcacacctgtaattccagcattttgggaggccaatggatcacttgaggtcaggagttcgagaccagcctggccaacacggtgaaaccccgtctctactaaaaatacaaaaattagccgggcatggtggtgcacgggaggctgaggcaggagaatggcttgaacccaggaggcagaggttgaggtaagccgagatcgtaccactacactccagcctgggcgacagagcaagacccggtctcaaggaaaaaaaaaaaaaaaaaactaaggcaattttagtagactcatagggtgggcaggcaatgacagctgccaccctagggaacaactgcaaggagttaagggccttgtaggagacttcagagattcccaccccacaaactcaggctacaataaataaatcaataggtgctataggcaaggtcccctgactcatgaacaaagggcagaaaagacgcccacctctccccagtttctgtactgcccccatcatgacacatctgctggtatcagcttagaagagaaaggatttctgtttacttctacatggtagagacacttcctcgtcccaactcctgaggttgagcttaacacagccgggagaggaaatccaaagccactgtatgcgtgactttaccagctgtgagtcagccggtgttccacaaactgtattttttaatgatcacaatctattgacttttaaaacaccaacaacactgtttaaaaagcacggtctatttaaaaagatgcttttgatttgcctccatggctccaaaatgataatctactttgtgacattttcaaatgattattttgccaaattaccactgaaaggttaatggttattttccaaattgatctcagatgtttaccgtttttttctgatgtcctcaggaagatcatgtcggcagggacccgctggttctgtgttatgaaaagaaagactgttactgtgaatgaatgaccgtgtgctgtgcggtggggaggggggcttccgcccccacccccaacccctcggtgggttggggcaggggggactgaaactcacagactcttttacgtttctgcctttgtcaaagacagatttggggatttattttgttttgaatctgaaaaatcttgcacactgctgctactttactaatcccctatcaaaatcttatcttggaaagagagcttctagttttctggcacattcaaccattacctcccaaaatcccaaaagcctgcctccccagctggctctcttccaggctgtctgctgagactcaagacagaccctcctctctcgctttctgcttctaccaacttaccagcttgatgtttggcttttagtggattttaataaggaaggaaagtagtaagaagcaacaaaagccattctaaaaaaaactggggggtgtggggagccagtagcccccatttaattatgaacagaaaagtatgtgataacatagatgggggttgtgtggttcttctgagctgccacccaaaagagtttcactttaccttaaagcagctttgagttcttggatttaatccctttaaaagagcatagctcaatttctacagaaacaagttaagacacaacccttttctaatcaaatattattccaagcctctccagagccacccctcaaaatccaataccttccaaatatacacactagaaaaagacatgagtgtttgctaaagtagcaaacatactgacacggctattttttaaaatgtatttttggtctttttactgttctcaggttacacttaacccctgctccccataaaataatagacaagcacaatggttaggtcaggaaatgcaagctaaaatggctcaaagggtaaattagataaatattttaagtgtctatgtagtaagcagacttctaggaaaaactttatgatattttttatcccaaaataataagcacatcgaacaggaaatcaaaacttgtacttgtgtttgtaagcaggatttctggctaaccaacgcatataaaccttgaaaaaatatttgtgtgtgtgtgtgtctgtgtgtgtgtgtgtctgtctgtctgtctcacaggaaagagatttttctccccaggcaaagtttttggatagaatcccaaaattcaacattcacttcgtctaccagatacacaaatgacacattaggacccatgaagtggtatccacacacaagcttccagattctgctcaccttttcaacgatgataaggtctccaacttggatgttagaactcttcaccttcactgtgcctgcaaagcagcaggttcaagatacatcaccatcttaattcatttcaattcaacacgtctttacagagtgcccagcctgcaaacacacaatacacccagaagtacacgctcccacacacagctgccagtgactccagcaccattatttcctgcctctccaggaaagggttcaaccgctacagaggccgttgcagaaataaatgcccacttcacagggcactggaataacttcagcccttcatgaaagatcatttatttgccttcagagtgacttagatggaaagtagtggggggaaaaaagtcttaattttcaacaccacttaacagtgacttagatgcaaagtaccgggggaaaaaagtcttaattttcaacaccaccaaaaagaaagaagctaactaattccaaatgactgatttactttttaatttataattgctacatgctttgatttataggattatgatcagactatataatttttgctggatgtttagataaacagtaaaagctaacattaaatgctaattctgtgctcagcactgtacagattttgaaggtttcatttaatcttcacaatagccctcagaagaaggtagttccatctccagctttcagacgaggaaaggagactcaggatgtcccaccttcccccaaagtctcagagttagaacaggtcagtgctgggattcacacctgcatctgactccacagtacagaataaaagcagtgagttccattcaacccaaaaaacatgactgggccaggcacagtggctcacatctgtagtcccaggactttggaaggccgaagcaggcagatggcttgagcccaggagttccaaaccagcctggccacatgtcaaaaccctgtctctaccaaaaacataaaaattagctggatgtggtggcacatgcctatagtcccggctattcgagaggctgaggtgtgggaggatcgcttgtgcccaggagatagaggctgcagtgagccgtgatcatgtcactccggcctgggcaacagtgagaccctgtctcaacagccagacagcatttactgaacgcctgctgtatgccaggcgttctaagggctggggatacgtgaaactcaattccagtggaggggaggaggcaataaacaaataatggatgaaaggggttggagaatcagaggggtggctgtcaacaaactctgtgggagagttgaggccagaattagacagacgaaggacactgtgtttaccaataacagacgaaaggcaccctgagatgtgagaaagtgggacaggtgaatagctaacagcatgcacacggccaaaggctagaactccttcagcaagacgtaaagcatcaggaaagcagggaacagcgagagatgaaagtggaaggggccagttggggccaggtggccccacaccctgtgagggagcccagagaggaagagagaatttattctggtgataggtgaaattcacatacaggagcaacaccacaaaatctttatgatgctgctatcttgtaacaagcccatgtaacttacaaatgttcagctaagagagagataaaaagtaattataggccgggcaccacagtggctcacgtctgtaatcccagtactttgggaggccgaggcaggtagatcacctgaggtcaggagttcaagaccagcctggcaaacatggtgaaatcctgtctctactaaaaatacaaaaattagcaaggcatagtggcaggcacgtgtaatctcagctactgaggcaggagaatcgcttgaacccgggaggtggaggttgcagtgagccaagatctcacccttgcactccagcctgggcgacacaagcaaaactcaatctcaaaaaaaaaaaaaaaaaaaaagaacttaaagacttaaagacacgaaataatataagtgcacaactctagacttttagtgtctcacatattttacattttaacataatttaatatcatttattttttaagtatttcactaccattgagatttttcagagcattccaatgttttcctattgaaacaactctctttaatcggttccataagatttgtttttaactaatttttgtgtgtcgttaaatcttgtcattaaacaataagtagaactggcatcaaaaggtctgatataaacactactgacttctgacttctttttttttcttttttagacggagtctcgctctgtcacccaggctggagtgcagtggcatgatctcggctcactgcaacctccacctcctggattcaagcgattcttctgcctcagcctcccgagtagctgggactacaggcacccaccaccaagactggctaatttttgtagttttagtagagacggggtttcaccatattggccaggcttttctcgaactcctgacctcgtgatccacccgcctcggcctcccaaagtgctgggattacaggcatgagccactgcgcccggccaacactactgacttctagaaagcactcaactaacaatggcgagctgaactaaccctcgatcgctggtaagacttctggactctcctagtgtgagtatttcaccctactaagtgagcatctagcatctaatggcacctcattttcataaaatgtgatgctaaactcaattcagtgaccggagccctggcctgctagagagagatccactggcctcctttcattatgtcttgggctttggtcaatacatttacagagagactggagaacatccaattagatgattagaaatgggtaaagaggccggacacagtgacccaaacctgtaatctcagcactttgggaggctgagacaggtggaccacttgagcctattagttcaagaccagcctaggcaacatagcaagaccctgtctctacaacaaacacaaaaaatcagccaggtgtggtgatgtgcacctacagtcccagctactccggagactgaggtgggaggaatgcttgagcccaggcgaccaaggctgctgtgagctgagattgtgccactgcacggcagcctgggcaaaagaacaagaccctgcctcaaaaaagagagacagagaaagagagagcgccgggcatggtggctcacacctgcaatcccaacactttgggaggccgaggcgggcggatcacctgaggtcaggagtttgagaccagcctgaccaacatggagaaactccatctctactaaaaataccaaattagccagatgtggtggcacacgcctgtaatcccagctactcgggaggctgaagcaggagaatcgcttgaacccgggaggcggaggttgcagtgagcccagttcgcaccactgcactccaacctgggcaacaagagcgaaactccgtctcaaaaaatagaaaacagagagggagcgaaagaaagagagaaatgggtaaagagacggtctaattggcagaacgatttcatggcctgaaccactcttcttgctccactagggggcaaaaggaaaaatgaacacagacctgtcgtttttctgggagctcaggaaggtattacttgaaggaagaccgtaaattcaacgtggccctcagcgccaatgaacttttccttcacctgagcttgccccaactttcccaaacataaatttacacattgtctttggttttattactaaaatttatgctgctgacctggcccaaatgatcacacccgggttcagatcttcaagctctagttacaggttccctcttaaaatctaactcatagaagagcatgtgttttcattcttattaaataataattgcctatgtatatgtgtgtacattagcaggacagaggacaaaatcagggagatttcactaaaaggatcagcagggctttctctggcacatatattttccaaatttttcacatgaattgtttttccattaagcgtaaggttgctttcctaagaagaaaaaaataataattaaaattagctcaaatttttaagtgaccagacccagatttttcccttctgcaagtgagtgctgatttatgatccattcatttgaactctgcctctctctgtccatctgttctgcctcaacaaaaacccctttaatcctctgtgtttgcagagcagtttctgagtaaccccagcaggccaatccttcatgcaaacacacctactgtacccaactgtccatcagccaacagggctcttgctccacctctaagggaggaagcaaggagccacaccatcatgaggtcacttgggatttttagccacggtcattcattagcattgcagtgttttgaggggatgagcctcggatctgcagcttgaacaaacacagattcccagactctccccttctgttgagctactgcagagtgctgtcaatttggacttcttgccccatgttgtcttttcttttggtgatcaaaaacacgtagtttggctgggcacagtggctcccaatcctagcactttgggaggccgaggcgggtggattgcttgagcccaggagtttgagaccagcccgggccgcatggcaaaaccctgtctctattttttaaaaaagttaaattaggccaggcgtggtggctcatgcctgtaatcccagcactttgggaggccgaggcaggtggatcatgaggtcaggcgttcgataccagcctggccaacatagtgaaaccctgtctccactaaaaatatataaaattagccgggcgtggtggcaggcgcctgtaatcccagctacttaggaggctgaggcaggagaatcgcttgaacctgcaaaggcggaggctgcagtgagccaagaccgtgccacagcccgggtgacagtgcaagactctgtctcaaaaaaaaaaaaaaaaaaattaaatatctatagatacatagtttgggccttcatgcttcatggtgtgtgtgttcgtgtgtgtgtgtgtgtgtgtgtgtgtgtgtgtgtgtgtgcatgtaatgagagaaaatacaaataaaaccagaatgaaaaggagaaaaagcagcaagaagaaaagagataaaaaagcagatactgttatttacattcccatatttactgggagttttccaccagccaggccctaggcttggctgtcagtatttgactaaaatgtccctctccaaggagctctcaagttggtagggagaaagagggagagaaaagagagaccaaagttagaagtgaggaatcactgggcattcagtggtcagaactgactcccagaatgaaaaaatcggtaagggtgtggaaagggcccaaaacacatgatttctaacttcacagcaaccactattctgagtcttctacgaacattgttgcaaaaaaggggaagaacaagatacggagaagtaacctaacagaagggttcttgtcttcctaagaaagtaacagcagaaagaaaaaatagcacattgatagcaattattaccaatctcaaaaaagggcaggaactctccctacaattgatctgacagaaaagaaaatgccctcctaacaggcctccggcaggcacacttcccaagcgctccttggtttttttgttgttgttttgttttggtctcatcttccccagagactcctaagatggaaaaaggaccaatacactcccagcttgggcgatgcttcactgttaatgtcttaaaattcttggtcagttttgtgtttttttaaactcaagatctaaccacctgatcttaatactttttgaacaaccccacctcccaccacaattttcatttttcactgggtcccacaaattatgtagctggtccagaagggaagtaaaaacacccaataatatcttcttataaagtgcacaggaaaacctggccctgtcctaagaaccgaggccacagaactctgaacttttcctgtaacaccccatctccaatatcgaggctccaagatttttaaacgcatttgcagaaattctacaaaggtaagagatttttgcaaaagttaagcggaaaattctctgcctgccacatcctaaatcattaaaagtcttctaataaatctatccctttcagctttcgccacttcacccaagtcgtctctcaatcagagtttgtaacggggaacaaatttccaattattagagctgtttatttctgtagcgatggacccccaagcctttcataagcaaacctattgagcccaaaccatgcctttcatggatgacagcttcagaataagagcagtttgtctacattgcagggagaaaccagatgtttcccttgagtcgaaacaagcaaatgacaattcagtcaaactgcagaatagcctaccaaaaaaattttttttaataaattccagggcagtaatatgtgtgggcctattttttgaccctgaacacctccatctatacttgtatttttcattgttcatgcagggcactgattgcttttgtagatctctaacaacaatctccatgcactaaccctggttaatgtattactctttaactcacactctaatctaactgtgacagtgatgagttgtaaattctgcttcatgtgtacatttcctgaggttgacattaaaacgcctctgcagacccagcagagttcagaggtttaaagttgaaattttcatattcaaatagagttgtctgcattccccaaagccaaagaaaagactgttatttgaaaacaggcaaagagttgaaaggattattataaataatcactaccacttcctggggcttttgtttaaatagtgggaacttaaaaaaaaaaaaaaaaaaggctgcagtttaaatgtaacaagtttatacccaacagtggcttttaaaataaatatataaatggtcttgccggtttatggtgcccagaaatgatgaagtagacgaacacccttacaggggggaaataaataccttttgggaataacagtgcaatttgcaagtttgagtttctggtgttttgttgtttttttttttaattaaacaatagatcagttcaccaatgacttgtactaaaatgaaattgagtactttgaaaggaaaatctgaactttgtggatcttaaataactttatatctgggcggggcacagtggctcaggcctgtaatcccagcactttgggaggctgaggcaggcagatcacctgtggtcaggagttcaagaccagcctgactgacatggagaaacaccgtctctactaaaaatacaaaattagctgggcatggtggcacatgcctgtaatcccagctactcgggaggctgaggcaggagaatcgcttgaacccagaaggcagaggttgtggtgagccgagatcgcgccatcgcactctagcctgggcaacaagagcgaaactccatctcaaaacaaaaaacaaacaaacaaaaaaaaaactttatatctgtaccaggcagtatgaaaaagtattcagcaaaatctgttataagtaagattcacttgtacctgctgatgctctgaatctcagacaagggaaatttgggaagggaattctttgctcactgaattgtctttgaggtccttagtgaaggatctttgcagcagttttgctgcagtaacattgaaaagtctatccataccattctcttctttaaaaaaaaatcataatgcatatcttagtgttctccatgtctggacagagcttatactttgaaacataagtagtacttgggtttaggaatataaagtttcaatttaattattagctaaacaattccccattaatgaatgcaccttccctacattattataccttctgattaaccacaatgacatacaactccaaaaaagaaaaaggtgcattcttaggtcttgaaatttaagtcacattaattgcaatcctagataatggtacaacatgggttttgtgctacactgaaaaatttgttgtctcttgttactcaagagatccttgaggttacaggtgattctgtaaatgagaaagagtaagcagagagcatcactcaactatctagaaagaagtggaaaaggaaagatatcaggtcgattttttataccacatatgtaggagaaagctgaagatacgcaaaagagcatagatctttggcttatgacttatggtcagcctgcccagatgtccccagcaggaaagaagcatcagcaattgtgttaattatgcctctgtttgcacttctttcaaggctaattgtccgcttgcttcatttagtccttgatcagaagttagtctgggaaagcattcctggtatgaacacccatggaattcatcttgtgaaaatgcaaatcccattttcctcaccacctgtgataatcgaggcaaccccccacccccattaaacttttggtttggggaaggcaagtataaagagaaataattccttcactaattattcttttccaatccaacccaattctcttgagtaacaaaactaagttttgctgggtctgctacatctccaagatcttctcctttctggctttatttccagtgccactgaatgctattaatttaggaagacagctctataattaaaaccataaaaactcataaaggtctaagaactgctcttaagtctctgatgtttaaatgtgaatttgtaagtaggaggaaagggatgcttgtttatccaaaagcactaccccatgtggttttcaacagtttgtccatctgacaatgaggaggctagattgataggtttctttggactcagagatgtgttttaaaatgactcaaatcttaaaagcacccctgtagcatatgtattaaggctgaacgctgtagcagttgttgagatattatatgcaaaagtgctgagctcacctcctggcacatagtaggtaacttgacttaaaggctaaggttttacatgcaaacaagcctgggttcacattccagctctgccttttgctagctcatcatccaagacaggatgcttttcctctattttgttataggggcctcagccatgaacctagcaatgagtgagagaaagaaatgttttccttccctacatccacacccataaaagctaccttcacagggctatctagaagactacagactaggctgggcacattggcttatgcctgtaatcccaacactttgggaagccaaggcaggaggattgcttgagcccaggagttcgagactggcctggtaacttcatctctataaagaattaaaaagttagccaggtatagtgacatgcaactatggtcccagttacttgggaggctgaggtgggagaatcacttaagtctgggaggtagagactgcagtgaactgtgactgtgccactgtactccagcctgggtgacagagtgaaatcccatttcaaaaataaagaacgaaaagaaactacagattaaaccttatctagcacctggctagctgatggcaggtagcctttcttcattttttctcctgcttcctaatttgaacagcagtttttcaaacagctcagtgccacctttttcctatagcatgcctgtactgtatatgaattcttcaaacacagaatcaacccttccatagcctcaggttctcactggcctgtgtggtcttctctggagaggctcaggaaacttcgcctaattgggaacagcaagctgctgttggaacctggggttctgtagcctgccaccccagccgtcacaggctgcagctttgcattcgacttgatgctctttttggagaactctttaccagggcatgccatctgggtcctggcctgagttccatgttcaggtgggtcccgtacttggtttaatgccctgctgttgccatcttgagattcttaataatttctgaataagggtcccacatgttcatttgcattgggtcccacaaatcatgtagccagtcctgctctcttccctcctctaagactcaagatgaaggtcacctcttctggaaagacatcaccagattctctctgatggactcccatcacccctggctcatacctccattaatccacccactgacacttaagaaatgcctgcttcaataccatccacactggcctctctccaccatgccaagtcccaaggcacagtgctgagctcttcccatgcaagagcttcacttacagcaaccctttaaggtaggtgctattattttccctgatgtagattcatttactgagaacttaaaggatctacccaggtggaagcaggactcctgaaccctggcagagcaagtttggagccactactttcaactcctgggaacgatgctcagaaccgagaatgcagtggccagaaaagggacattccttatgaggatcaccacacttattccactttttgtaactatctgtctacaggcctgaacgcctcactggattataacttcctgggaccccaggctctcacgttcatctctgtgatgcagaaacctagcatagacttggtacatgatgaagtctcaactgtgtttgtgtgtgtgtgtgtgtagcgtgtattttagagatggagtctggctctgtcccccagtctagagtacggtgatgtgatcatggcttactgcagtgttcaactcctggcctcaagcaatcctacctcagcctcccaaagtgctggcattacaggcatgagccactgtgcccaaccaaatatttcctaaaataatgactaaaaggtcatttccatgtagatagctaatttgattatcaaagtacttcaaatacattttattaagccatggcagttgtatcaaaaattaatccaattgatgttgttcgagatacaccttggctgggcacagtggctcacatctgtaatcccagcactttgggagggtgaggcgggtgccatcacttgagctcgggagttcaaaaccagcctgggcaacatggcgaaatcccatctctatgatttaaaaaaaaaaaaaatgatacaccttgattgaaataaaattatctaaaatgttgaaaactaaaacaaagcaacaacaataaaaaaacctgtcatccatttttcctcccaataatgagttcctattaatgaggattttaattcagctgtttaaaattactggccaggcatggtggctcacacctgtaatcccagacctttgggaggccgaggcgggcgggtcactcgagcctaggagctcgagaccagcctggccaatatggcgaaacctcgtctctattaaaaatacaaaaattagccaggcatggtggcgcacacccgtaatcccagctgcttgagtggccgaggcagggagaactgcttgaatccaggaggtggaggttgcagtgagctgagatcacgctactgcactctagcctgggcgacagagcaagactccgtctcaataaataaacaaataaataaataaataaatctagttttgaggccacatccaacaaatacaaatggagggacaggatacaaagtaactgccttgaaactggcctgtcctcttcgaaatgtcaagatcacgaaagacaaagaaaaccgaggagctctgccaggctagagaccaaggagagaggacaactaaatataactgacaaacctggtctgttcctgaactaagaaaaaaatgctatcaaaggacattttagggacaaatagcaaaattttaaaaaggattgtaaattagattaatagcaatatattgatgctcaatttatttgattttggtaattgtacataactgtgttatataagagaaacgtccttcaaggaattaagcacttaagtatttaggcacaaaagggaatgtctgcaacttgtctcaaatgaccccagatatacctatatgtatatggacattgggggaaacaaaagtattaaaaagcaactgtggccaggcacagtggctcacacctgtaatcccaacactttgggaggctgaggtgggccaactgcctgaggtcaggagttcaagaccagcctggctaacatggtgaaaccccgtctctactaaaaatacaaaaattagcagggcatggtggtgcacacctgtaatcccagctactcgggaggctcgggcaggagaatcgcttcaacccgggaggcagaggttgcagtgagccgagatcgcgccattgcattccagcctgcgcgagggggttcggtggggaagaaaaaaagcaactgtgcagcctgggcaacatggcaaccccatctctagaaataaaaaatagaaatttagcagggcgtggtggtgtgcacctgtagtcccaactactcggaggctgaagtgagaagattgcttgagcctggaaggcggaggttgcagtgagtccaggtcccaccactgcactccaacccgggtgacacagtgagatcctgtctctaaataaataaataactgtggtgaaatgtcacaattcatgaatctgggttaagggcatattggaattctccatataattcttgcaaattttttgcttgttaggaattattgcaaaaacaaattttaaaatttaactacaataatacaagtactgctattattattcatcataaaaggatgtagcaggtaggtaaataccatggtctataatctagtgatcaaggcattctgactcctggccattttcaccccacaaaatactgttgaaaagaacattttaagacctcatgtgaggccgggcacagtggttcacacctgtaatcccagtactctgggaggctgaggcaggtggatcacctgaggtcaggagttcaagaccagcctggccaacatggtgaaaccccatctctactaaaaatacaaaaaattagctgggtgtagtggcatgtgcctgtaatcccagctactcaggaggctgaggcaggagaatcgcttaaacccaggaggtggaggttgcagcgagcgaagatcgcgacattgcactccagcttgggcaacaagagcgaaactccgtctaaaaaaaaagaaaaaaacttcatgtgatagaaagaaaacagtccatcatgaatatactcatacatacttatttcattttgctttggaacttactaagtgaagatggtgaagtttttgctcaaggaaatattatgaaggaattcgacaggaaagtcaaaaaaggcttctttttctccctcttccctgcaatctcccagtttaggtttgctactctggccctccccccaaaagcgtatcaaataactaaactcgcctcgatcactttccaagctgacagtttcttcagtgttttgctgggctttcacaacaaactgcagcgctagggtctgggttaatattcagaactgtgttctgttttccctagagtgggattggcataacaatggacaccaggggccgcaaagagagacccacaaaggaagacaagtttttaatgctagagccatctgccaattctccttaggactttctcaagagctgagtgaagttgaagcaagagctgggaaggggcgtgcagtggagggcagaaaaatcattcacgggaaaagcaattgcaatatgaaaagaaccaaaggagggtcgaagcccggatggatgaatgaatggaatccgaaggcctcttctcttgagctctgaagagatccaccgcactctctccgatggggcttttgttggttgccaagcgttttaaatgttatagtaagaatatgttattaagggaggatttaatatacacgaaccacacacaaaaaaagccctccagaagggtcttctgactactcacgcagaaagcccaagccacctgcctctgcaaagattacactgattctttttcttttggtagcaacatgtcctaaatacagtagtttagcatgaataaagcatttctttaccaactctaaattcccccttctcccagagatgtgcatatttttaagaccaccaaccacgacaatgtattcaaataccctaaaacaaagtattttcatacccttgggaaatataattaaaatctgcatttttttttagcccaaaacatacacctttgacatttttcccaaaaggaaaactctactgaaaaccccgaaggaaccatggatggactgcttccttggaagcataaagcacttaaacagcagttcagaccttggctcaggtgctaagtcccttggcatctaaccatcttatctctttccaaattctcaatttcctgaaggcaaggcatagcctttattcccctccacctctttaaacagcattaatccctgaatgggatcagtcatcttaggggacaatcgaatagactttccttggccagattagcaaactttaggtaacattctctcatttctgaatgcaaccttacagtaaatctattgtagtcagacacagacatcaacaatggctgggttgttttgtggcttttccaccgtgtgtttcagtgggtttttaagttctagcatttaaaatgcacatatcttgcaagtggggggtcagtgattaaagctttttcatatccctgggaaatattattaaaatttcaatttcaattttttttttttttttttttttgagatggagtttccctcgtcacccaggctggagtgcaatggcgtgatcttggctcactgcagcctccgcctcctaggttcaagtgagtctcctgcctcagcctccggagtagctgggattacagatgaatgcaaccatgtccagctaatttttgtatttgtagcagagacagggtttccaccatgttggccaggctggtcttttttttttttttttgagatggagtctcgctctgtcgcccaggctggagtgcagtggcgcggtctatgctcactgcaacctccgcctcccaggttcacgccattctcctgcctcagcctcccaagtagctgggactacaggcgcccgccaccatgcccggctaattttttttgtatttttagtagagacagggtttcaccatgttagccaggatggtctcgatctccggaccttgtgatcagcccgcctcggcctcccaaagtgctgggattacaggcgtgagccactgtactgggccaaaatttcaattttttgtttttgagcccaatacatataactctgacatacacaactggtcatttatttttggatcagactccatgctctgcaggcctcaatttccaggatttataaaatgccttcaaagaaatcttcatggatgcagttatttatctaaatcggttgcctttctaaaaactaaagtagcaacagtttaatcactgccaaaagagtatctttgaaaacagtttgcagcctctcatttgaacagcagaggcgccctacttccctcttcagccaggcggcagaacgggaaagggattagccagctgggatgccagcacacaaaatgtaattccaggtttatgacacataagttatttgacaagaccaacaccaagaggcctgtggatgctgccagggcctggtgggaccccgtcaacctgtcatccagggcagatggaggcctccctggtgctggagtaaccaagcgactgttccgccacgtggcattcccacacctgcggcccgggccttgaactcttctcccctgactgtcagcggcccgtgattgagctgcaaccctgtggcccaggagccagaaggctgacctcgtgctgtgagccggctgtagacctgggagttgacttccttgtcccgcacgtagcatcggatctcctccaccgcctcacggatgacagtgacggccagcacgaagccctgcagagacagacgacagtgagtcttgctacaggcagtgagccctgctgcagccaaccgtcccctcctggtgccaggggcaggaaaggcgagaggtcacttgggagggcaggggggcaggacctgtgagttattccaaatgcacacgccgctgcaagccccctctctgaatctgtcttagggaacatgcactcccaaacacaacctgtagaaacactaccctagagaaacactcactgccacacacacacaagcacgtccacattcaccacctcagggtgagggtgacacacacaggaatactcaaactgtccctccacaagcaaacgatggtgactactaatactgtctctcacccaccatgtgctgggcagtattggaagtgcacttcatcctcataacaaccctgagatatgctcctataactgagatccccatgcagatgaggaaactgaggcacagagaggctgagtaatcttgcccaaagacataaagctactaagtgataaatgggaactgcaatgtaggaaatcttaatctttactgccactgtatctagagaaacttaggtggatggagccagtaagagggaccaccaggcaacagttaaacagaataagatacatccattgcattcacagagccaagtggaaaaaatccatctttcaggacatacactgcaaccccattcatataaatagcaacaaagattctatacaattaaatgttttccaatttccttaactacaggttagatttctctgccgggaaggagactagaattaggatagggagggactgaaaggtgcttcagcctatctgtaatgtcttcagttttttgttttgtttgtttgttggagtctcactctgtcaccaggctggagtgcagtggctcgatctcggctcactgcatcctccacctcccgggttcaagcgattctcctgtctcagcctctcgagtagctgggactacaggcacgcaccaccacgcccagctaatttttgtctttttagtagagacgaggtttcaccatattggccaggatggtctcgatctcttgacctcgtgatccgcccacctcagcctcccaaagtgctgggattacagggcttttttgtttgttttgagatagggtctcgctctgtcacccaggcaggagtgcagtagcatgaccttggctcactgcaatctccacctcccgggctcaagagatcctcctgcctcagcctccggagtagctgggaccacaggtgtgtgcgccaccatgcctggctaatttttgtatttttggtagagatggtttgttgttgttgttgttgtcattgttacagagtctcactctgttacccaggatggagtgcagtggcaccatctcggctcactgcaacctccgcctcccgggctcaagcgattctcttgcctcagcctccccagtagctggtattacatgcccacctaatttttgtatttttactagagacagggtttcaccatgttggccaggctggtcttgaactcctgacctcaggtgatccacccgcctcggcctcccaaagtgctgggattaccggcgtgagccaccacgcccagcagagatgggtttttgccatgttgcccaggctggtcctgaactcctgagctcacgcaattcacccacctcagcctcccaaaatgctgggattacaggcatgggccactgcgcccagctgttttaagtttttataaggaaactctattaaagtattaattgcataagtagaaactaataaaaattttaaacttccccaactttcctctgagttgggaaccccaactcataatatctggttgggtggagggagtcacccatagcagaatctacttccaatctagatttttttcctcttgtaatcaataaagccaaaatcattcatttattttacttacttgtttacagtcattcgttttccttgtcattccttcccctatccccttttaaagcttgccaggacagttattttttaaatacagtcagcataaccacccaagggttagcagttgtggttcttggagaatttcactttcatagtttaccctgtgaaatatattaacttcgattcaaaggactttaaatctcttatgtaaatctatccagagatgtgctgctttgtgaaactcctcccaatgcccatacatctttacaatcaaaggattactcctgtttccaatcagatgtaaagtacacactgcagccaaaagaaactggtacatttcagaatcaaagcataaccagaccacatagggagtgagagaaaacctgttctgtgaggagcacgtacccggtgtgcagggctgccccctccactatgctgctattttgttgttctgtgccaaaacccaagttttcgttgttgtttgttttttcgaatgttccagtttctatttctctctgcgtgggcctggctaaatcccattgatgttcatggaaagtgtgtgctcatacaaagacaggagccgctcactaacctccctgctgcaaataaataccacctcctaaattatcacgtctcccttcacatatacacacacagttctcattaatcctaggggccacgccatgccttagtatttttactagagacagggtttcaccgtattggccaggctggtgaaattgccttacaaagagatgcaaatgtagtccaggaataaattccaaccatccaatttaggaggtccttaatatccattcacagatatttagaaagaagctttaatgggcaggggaaggggggctgttgaaggaggcagctgttggagctggtgaagaatcataggcagtgacaactcacagacaagcaactctgaaagtgcaagcctcttttgccaagttgtacctcaaaaataaattcactaaagcaaagctaatctatgggagatagaaatcagaaaagcagttgcctggggtggtgggggcgggtggggtgataggaacaggcactggggaacttcctggggtgatggaaatgttccatatcttgattgaggtggtatttatgtggaggctgacaaatgtcaaaactcaatgaactgaaaactgaagatctgtgtattttatggtatatagattatatctcaataacaaaaatactccacatttatttggtcatcatataatgttacagattatttctgctctcctgagttacttctcccctaacatattagtaccaagaaaaaattattaaaagctaaaacatggctgggtgtggtggctcacacctataatcccagcatttggggaggctgaggcgggaagatcgcttgagcccaggagttcgagaccagcctgggcaacatagggagaccccatctttacaaaaactacaaaaagaatcagctggtttctacaaaagaaaatagaaacctgaaacagaaaaaaaaaaaaaaatagctgggcatggtggctcgtgctatggtcccagttactcaggaggctgaggcaggaggattgtctgagcccaggaggcagagattgttgcagtaagcagagattgagccactacactccagcctgggcgacagaatgagactctgtctcaggggcaaaaaatttaaaacttaacaatgaaaaacatgtcattagtggcagaatttaaaaattaaaatcagaatgtttcctgagaattctatacagccacatgaagcatttttacttgcagtaattcatttaaacctcccaacaaaccaaggcagtagaaaggatcattcctttttacagatgacaaaactgaggctcagaaaagtagccttggttcaaattacacgacttctcagagtcagctgtcgtggctcacacctgtaatcccagtacttcgggaggccgaggtgggcggatcacctgaggtcaggagttccagatcagcctagccaacatggtgaaacccccacccctattaaaagtacaaaaattagctgggtgtggtggccacctgtaatcccagctcctcgggtggctgaggcaggagaatcgcttgaacctgaaaggcggaagttacagtgagctgagatctcaccactgcactccagcctgggtgacagagcaagactgcctcaaaaaaaaaaaaaaaaaaaaaagatctaaacccaaaccacttggctccacagccctcattcagaactgctgcacttaagagttgggtttgaaatgaggcaactttcagagtggctagaagacgtttcaaaatgtcttctagccaagaactgaaaattgactctctacataaaaatctattaaggaaatcagcgatggtcacctagaagtagatgctgtctaatttttcaccacaaacccttttttctgtagctgttggaaagagaggcaacaatacaagacaaatatcccccaacttagccatcacaggaaaagctgactaaaaagggtctacaacgtggagaccaactgctggaggtgccaaaacctagaaacaagctattaacctgcctggcttctatcctaagctatagtcaaagggaaaacaggccagtcaggagacagcagaggtgggagtaggggcagagaaggcctcagtggaaataaatttttaaaaagtcataattgccgagtgtggtggctcattcccataatcccagcactttgggaggccagggcaggcagatcatgaggtcaggagttcgagaccagcctggccagcatggtgaaaccccgtatccactaaaaatacaaaacttagccgagcatggtggcgcatgcctgtaatctcagctacttagggggctgaggcaggagaatcacttgaacccgggaggtggaggctgcagtgagctgagatcacgccattgcactccagcctgggtgacagagactccgtctcaaaaaaaaaaaaaagaaagaaagaaaaggaaaaatgtatgccaaacatggctaaggtctcctcctaacatgcataccaatgatagtgtaaatgaggctgcagggctgctcatgtctgtaccccaagacattgcagccagggcaatggataaggggaggcggcagagaccagactgcacatcacgcttgagatataaaaggcagggagacggagagacacatggctgccttcgaggacaccttgggatcccaaatctataaaacatgcatctgcagaatatatatggtttatgtaaggtaagttatagtatacataaaatacatgcataagtaagaaggcactggaaggaaacacaccagaatcataaatgggatattttagggtagtagctacacaggtgattttcatcaccctatgtgtgtgtgggggggggttgtttgtttggttgttttggtactttaaatatttctccaatatcatgcgatcttttctatttgaaaaaagaacagtgaacaggagcagctttggaggagtggggggcaaaaagaatggcaggatctggcttttaagataattcaaaagatgtggcttgagtcgagcgctcacacctgtaatcccagcactttgggaggccaaggtgggcggatcacatgaggccaggagttcgagaccagcctggccaacatggtgaaaccccatctctaaaactacaaaagttagccaggtgtggtggcccacatctgtaatcccagctactggggatgtggaggcaggagaatcacttgagcctgggaagcggaggttgcagtgagccgagatcgcaccactgcattccagcctgggcaacagagcaagactccatctcaaaaaaaaaaaaaaaaaaaaaaaaaaaaaaacaggccgggtgcagtagctcatacctgtaatcccagcactttgggaggccaaggcaggtggatcacgaggtcaggagttcgagaccagcctgaccaacatgatgaaaccccatctctactaaaaacacaaaaattagctgggcgtggtggtgcgcgcctgtagtcccagctactcaagaggctgcggcaggagaatcgcttgaacccgggaggtggaggatgcagcgagccaagatcgagccactgcattccagcctgggcgacagagtgagactctgtctcaaaaaaaaaaaagagagagagatgtggcttgagagatggggtctggagcattccttgctgggggccagggaagggcctcctgagcccagaagcacaggggtgaggtaatatgaaagtccctcaccttcaacaagagcagagaggacaagggacagcctgaacatacagaccacgaggaaaagggatgggtccaattcacatactgctttaaattgttattaatgagttgttgatgtttaaaaatcaagagaaaaaatactaaaaatttttaaaaatgattaaaaactatgtgtatcttatttttttcctaaaaagaagaaacatgggccaggcgcagtggctcacgcctgtaatcccagcactttgggaggccaagatgggcggatcaagaggtcaagagatcaagaccatcctggccaacatggtgaaaccccgtctctactaaaaatacaaaaattagctgggcgtggtggcacgcacctgtagtcccagctacttgggaggctgaggccggagaatcgcttgaacccaggaggcagaggttgcagtgagccaagatcgcaccactgcactccagcctggcaacagatcaagactctgtctcaaaaaaaaaaaaaaggggggggaagaagaaacgggctgggcacagtggctcacgcctataatcccaatactttgggaggccaaggcgagaggatcacttaaggtcaggagttcgagaccagcctggccaaaaatggtgaaacccccatctctactaaaaatacaaaaattaactgggcgtgatggcacacacctgtaatcccagttactcaggagactgaggcaggagaatcacttgaacccgagaggcagaggttgcagttagcccagatcatgccactgcactccagcctgggtgacagtgagtgagactctcaatgaatcaatcaataaaaagaaagttgtaagaatttttattcattgtactttgttcataagcaactctggagggaaggacaagaaatgaaagtattgcaaaactggatggaagtagattcttcaaaaggaacatttgtatatttcttgagtcatgtgaatgtactacctttcaaataactacactttaaaaagataaccaataaaaggcagtatgataaatgttattttatatacattgtagaccaactttgttaaagtaacttatggtttgatttttatgtaagtatacagtaaacagttatggaactaaaaaactaaaatgaagttagagtatttcacataaaactatagagtttgtaactcttgggtctggcaactcctggtccctgtttgtacctgactgggcagagtagccgacaggagcttctcattctcccagggctttactgcatcagcccagctctagggcatctcagtttataaggtaaagcccaacagtttcctaggcctagcgcagtggctcacacctgtcatcccagctttgggaggtcaaggtggacggatcacttgaggtcaggagtttgatagcagcgtggccaccatggtgaaacctcgtctctactaaaaatacaaaaattagccgggtgtggtagtggctgcctgtaatcccagttactgaggaggctgaggcatgagaatcgtttgaacccgggaggtgatggctacagtgagccgatatcgcgccattgcactccaatctaggcgacacagcgagactctgtctcacaaaaaacaaaaacaaaaaccgtttcctgatgatcacaatatcagtgcttaaaggcgcaggcaccacctggcagttggttaagcatgccacctgatacaggcaggaatgtctgttatcagaggggaagggatgcttggataaagggcctctctagctctcaggatgctacttcaccccaaaatgactcagagcagaaaagaactattctcgtcatttcagaagcacctgcattgtttgtgtggaagaaatgacctcccttcctcttctcagggcaagagctgctggcatcacttgtctgataacatggcacgtacggcgtatgcacgcccactccctggtccctgagcatctggcttcctccactccacaagcacgtctacaccaaatccttatcatccctcacctactgccaacagcaaaaaggtttattgtttttgtttctttaaggagagcctaaatcttttttatgtttacaactttctcttagtcaaaaaaatttaataagttgggcgtgtcggctcatatctgtaatcctagcaccttggaaggccaaggtaggtggattcctgagcccaggagttggagatgagtatgtgccacataatgagatcctgtctctacacaaagctttaaaattagccaagagcatcgttcttcacagaattagaaaaaacaattcttgggccaggcgcagtggctcatgcttgtaatcccagcactttgggaggccaaggtgggtggatcacgaggtcaggagatcgagaccatcctggctaacacaggtgaaaccccctctctactaaaaatacaaaaaaattagccaggcgtggtggcaggcgcctgtagtcccagctactcgggaggctgaggcaggagaatggcatgaacctgggaggcggagcttacagtgagccacgatcacaccactgcactccagcctgggtgacagagcaagactccatctcaaaaaaaaaaaaaaagaaaaagaaaaaagaaaaaacaattctaaaattcatatggaaccaaaaaagagcctgcatagtgaaagcaagactaagcaaaaagaacaaatctggaggtatcacactacctgatttcaagctctactataaggccatagtcaccaaaacagcatggtactggtataaaaataggcacatagatcaatggaacagaatagagaacccagaaataaacccaaatacttacagccgactgctcttcaacaaaacaaacaaaaacgtaaagtgggggaaaggacacccttttcaacaaatggtgctgggataactggctagccacatgtaggagaatgaaactggatcctcatctctcatcttatacaaaaaatcaactcaagatggattaaggacttaaatctaagtcctgaaactataaaagttctagaaggtaacattggaaaaacccttctagacattggcttaggcaaggatttcatgaccaagaacccaaaagcaaatgcaataaaaacaaagataaatagttgggacttaactaaactgaagagcttttacacggcaagaggaacagtcagcagagtaaacagacaacccacagagtgggagaaaatcttcacaatctatacgtctgacaaaggactaacatccagaatctacaaagaactcaaacaaatcagtaagaaaaaaacaaacaatcccatcaataagtggactaaggacttgaatagacaattttcaaaagaagatacacaaatggccaacaaacatatgaaaaaatgatcaacatcactaatgatcagggaaatgcaaatcgaaaccacaatgcgataccaccttactcctgcaagaatggccataatctaaaaatcaaaaaacagtagatgttggcgtgtatgcagtgaacagggaacacttctacactgctggtgggaatgtaaatacaaccactatggaaaacagtgtggagattccttaaagaactgaaagaagaactaccattgatccaccaatcccactactgggttctaccctgaggaaaagaagtcattatacgaaaaagatacttgcacacacgtttatagtggcacaattcacaattgcaaaatcgtggaaccaaccccagtagctgggattacagacgcccgccaccatgcccagctaattttttgtatttttagtagagattgatgcccatcaatcgacgagtggataaataaactgtggtatatatattcaatggactactcctcacccataaaaaggaatgaattaacagcatttgcagtgacctggatgagactggagactattattcgaagtgaagtaactcaggaatggaaaaccaaacatcatatgttttcactaatatgtgggagctaagctatgaggacacaaaggcataagaatgatgcaatggactttggggacttggggaaaagagtggggagggaggcaagggataaaacataacaaatagggtgcagtgtatactgctcgggtgatgagtgtgccaaaatctcacaaatcaccactaaagaacttactcatgtaacaacataccacctgtaccccaataacctataggaaaaaaaatgaattaaaaaaaaaattatccaggcatggtggcatgtgcctgtagtcccagccacacagggggctggggcaggaggattcctttagcataggaattcaaggctgcagtgagctatgattgcacactgcactacagcctgggcaacagcaaattcttttttttttttttttttttgagacggagtctcgctctgttgaccaggctggagtacagtggcgctcactgccacctccgcctcccggattcaagcgattctcctgcctcagtctcctgagtagctgggactacaggtgcatgccaccaagcccagctaatttttgtatttttaatagagacagggtttcaccatgttggccaggatggtcttgatctcttgacctcttgatccgcccatctcagcctctcaaaatgctggaattacaggtgtgagccaccgtgcccggcctaaaagcaaattctttaattaaaaataaaaatagagccaggtgcagtgtctcacgcctataatcccagcactttcggaggccgaggtgggtggatcgcctgaggtcagtcgtttgagaccagcctggccaacagagtgaaacccatctctactaaaaatacaaaaaattagctgggcacagtggcgggcacctgtaatcccagctactcgggaggctgaggcagaagaatcgcttggacccaggaggcagaggttgtggtgagctgaaattgcgccactgcactccaacctgggcaataagagcgaaactccatctcaaaaataaataaataaaaataaaaacgttaatgagatttatgaacagagaatccaagcgttccccccctgggtcccacttgttgagaatataaacagcaactgcatttcataatacctcagtttggagaaaaaagggtatctattctgccctctccatagctcagttacattggacctctttctgtttctcaaatgctctaagcacatgcctgctgcagggcctttgcatcactgccccctggaatagtctccttcccatcactcctcaggaggcctttcacagccacacaggctaaggctgccccttcacatctcctacccttcaccttcattcatgtaaaaaatactaaatgtatctgggataccccatctgtcctacgaccttattctgttaccttcagagcacttttcacaatttgtaacaatttcatttactggtttattgtctatcccttctgaatgtcagccccacagggcagaaatatttgtctactctgttcattgctgcacccccagaacccagcacagggcctggcacacagcaggtgctcaaccaccatctgccaaatcaatggagaaagaaaaggaggcgagggaaggaacagaggggctactcggttctgctacacatcgcatgcacaaaagcatagattctgctacttttccaacccctcacactcaaatactctacattggttaaaaagaaaatgtgatcccaggaaacaattcaaatacaaggtgagcatccctgatgcagaatgcttgggagccgaagtgtttgagattgcagatgtttccagattgggggacatctgtgccatccttaccagttaagcatctcaaatccaaaaatctgaaatccaaaatgctccagtgagcatttcgtttgagtcccatgttagtgctcaaaagttttagattttacatttatttatttggaatttttttgtttgtttttgtttttgttttgagacaggtctctctccatcacccaggctggagtgcagtggcgtgatgtcaacttactgcaacctctgcctctcaggttcaagcgattctcctgcctcagcctcacaagtagttgggactacaggcacgtcccaccacaccccactaatttttatatttttagtagagatgggtttcaccatgttgcccaggctggtctcaaactcctggcctcaggtaatcctcccacctcggcctcccaaagtgctaggactacaggcatgagccaccgtgcctggccagattttagaccatttgagattttggatttgggatgctcaacctgtgatataatccatgaggacaggggatttgtctttctcatttacctctgtgttcccagagtctagacttgtgccatatacaataaacatacaataaatccttgttgagataatgcaagacccaacagctaaatgaataaatgaacggcacaggctttgctatagtttgatccaggcggtatatgaaatggagcttcaacgttaaagtctcagagactcccaatgtattggcctaagggcatcctttcccttacaaggccaccatcccattccagatgcctaagtgagagaaacaaagaactttctgtttccaaacctctaaggttactgaacaaacaatgccgattaacttaccaggggaacccagtaggtatagagtgcaccaagtctcatttcgggaacaaactgagagcaggcaagaagtaagaaatagaggttgaaaaagtatttgaactggttgaacagcacctggaatggagggagacaacagagaaagacattcagggcttgtctgatgagatctggaacatttggtgggaaatgaataacatctaaaaacattcctgcagccaggcgtggtggttcacgcctataatcccagaactttgggaggccgaggcgagcggatcacctgaggtcaggattcgagaccagcctgaccaacatggcgaaaccctgtctctactaaaactacaaaaattagccaggcgtggtggcaggcacctataatcccagctactcaggaggctgaagcaggagaattgcttgaacccgggaggaggaagttgcagtgagccaagatcgcaccattgcactccaacctgggcaacaagagcgaaactctgtctcaaaaaaaaaaaaaaaaaaaaaaaaaaatcctgctttataatacaatttacactatacttttcacatagagcttaaacacttccatatgttgtttagaaaaacatacatgggtaataaaagtatcatttgtaaaagaaagagtaaataatgatatacatggaaattgtaaataccaaattcagaagagtagttacttcctggggaaggggtaaaatctaacatggaggggcacacaggggcatcaactatgttatgtgtgttttggggtttggttttgttttttgagaccaggtctcgctctgtcacccagcctggagtccagtggcgtgatcgtagctcactgcagcctcgaattcctgggctcaggcgatcctcctgtcacagcctcccaagtagctgaaaccacaagcatgcaccaccatgcccagctaaattttttgctatttgtagagacagggtctccctatgttgcccaggctggccttgaactcctgggctcaagcgatcctcccacttcagcctcccaaagtgttgggattacagacctaagccactgcgtccagactgtgttatttctttttttttttttttttttttttttttgagacggagccttgctctgttgtttaggaggaggtttttgcggaaaatgcttatgctataaggttgagtgcaaaaagaaataaaaagttatgtccagccaggcgcagaggctcacacctgtaatcccagcactttgggaggctgaggcaggcggatcacgaggtaaggatatcaagaccatcctgcccaacaaggtgaaaccccgtctctacaaaaatacaaaaaattagccaggcacctataggctactcaggaggttgaggcaagagaatcgcttgaacacaagaggcagacgttgcagtgagctgagatcgcgccactacactccagcctgggtgacagagcaaaactccatctcaaaaaaaaaaaaagttacgtccacagcatgtccagacgtggtggtacatgcctgtaatcccagcactttgggagggcgaggttggcaaatggcttgagctcaagagttcgagaccagccatggcaacatggtaaaaccccatcactacaaaaaatacaaatattagccaagagtggtggcatgcacccgtagtcccagctactcaggaggctgaagtgggaggatcaattgagcccaggaggcggagatagtagtgagccaagatcatgtcactgcactctcgcctgggtgacaatgagtcccccacctcaaaaaataaaaagtgaaaccccatctcaaaaaataaaataaaaaataatttttaaaaagttaaatggccgcacacagtggctcacgcctgtaatcccagcaatttgggaagccgaggcggatgaatcacgaggtcaggagttcaagaccagcctggccaacatgatgaaaccctgtctctactaaaaaataaaaaaagtagccggacatgggagcacgtgcctgtaatcccagctactcaggaggctgaggcaggagaatcacttaaacccgggaggtggaggttgcagtgagccgagatcacgccattgtgcaccagcctgggcaacagagggagactcagtctcaaaaaaaaaaaaaaagctatgtccacaacatgacctcaactccataaaataacacagtcaaatcctcccctggggagcagctaggtgctagtgtggttctgaccattggcatgcacccgagagtcagactgagaccacatgactagtttgggccaataggtaatgaatggacgtactgtgtctcgttgaggctaaggcagctaagaaccattggtgcctcttgagccactctggtgactttggtggccacatagtccaggtgccatacccaggaaatggaggagtgtggcccagtctgcatcagactttccatgaatgagaataaacctattcctcacttgaggtactgagagttggggggagttgaggaaaccagcaatgaatatagtcaaaatcacccttaaaaacattcacggctgggagcgctggctcgtgcctataatcccagcactttgggaggccaaggtgggtggatcacctgaggtcaggagttcgagaccagcctggccaacatggtgaaactccgtctctactaaaaatacaaaaaattagccgggcgtggtggcgggtgcctgtgatcctagctacttgggaggctgaggcaggagaattgcttgaacccaggaggcggaggttgcagtgagccaagatggctcactgtgctccagcctgggcgacagagcgagactccatctcaaaaaaaaaaaaaaaaattcaaatttctgtttgggaggctgagagaggagcatggcttgagcccaggagtctgaggctgcaataagctctgatcatgccactgcactccagcccaggcaagacagtgagatctggtctcttaaaaaacaaattccaattgaccttgaactcgactatataatagatttgtgcctctgcactatcactcaatatctaacactaccattatgttcctttctgcattggagctgattgctactgctgcttctcaaagtcaactggtgtgtgtttggaggcagtgctggataaaaatagatatttaatttatgtgcatgttggggagaaggtttgctgagtacatgtccacagatttgtgtaagttaatgtggaagtgttatgccaccagaaacatttattattagcaaaaatactaatgaaaattctctctatagatggtaagattaaaatgcatctttattttttctcctctaagctattatctcccaacttgccaatattgactacatgtgtcatgatggggggaaatttaagcactgctgacattcttttctgctgttttggtcataatgctaggtccccagaatgtctttttcattcttaggcttagcacaccaaatacatgtgaagttactctaactgagcaggtggggtcacagccttgcagagagaaggcaggtgccccctccaccccaccccacctccaaccccgccactacccagtgctgaacccagggaagatgaacaaccagggactaaggtggcacagaaaagtcactgacatctgccacagggaactcagtcttttaagactgtaccggcgggcaaggtggctcacatctgtaatcccagcactttgagaggctgaagtgggtggatcacctgatgtcaggagttcaagaccggcctggccaacatggtgaaaccccatctctactaaaaatacaaaaattagccacgcgtggtggcacatgcctataatcccagctactcaggaggatgaggcaggagaatcgcttgaactcaggaggcggaggttgcagtgagccaagattgcgccactgcactccagcctgggcgacagagtaagactctgtctaaaaaataacatgacatgacataacatctgtaccaatgcatgtatttgtgatggaaaaaagaaaagagcacggtccctgcctgcacgtaccccaggaagaaaggtgaagaaattgtacttctgattgttgatgacattccgaggatacctctggtctctcttctcggggtgccccagccagacagtgcggggcctggcctcccctccaccgcagcatctcagccactcgcagcacctgtgggaaagaaacccacgcatcaaggccacgcccacgcatcgaggctgtgctcatgtctgcccactcttcgcagattgcttttctctacagcatcttctctggctcaggaccacagccatatttgaggcttcatctttcagtgaaacaagaaaacagagcagaagctcccacgaagctgtggtccaaataaaagatgctttgtcctggccaggcgcggtggctcacacctgtaatcccagcactttgggaggccgaggtgggcagaccacaaggtcaagagatcgagaccatcctggctgacatggtgaaatctcgtctgtactaaaaaatacaaaaattagccgggcgtgttggcacgtgcctgtaatcccagctactcaggaggctgagggaggataatcgcttgaaaccaagaggcggaggtcgcagtgagccaagatcgcaccactgcactccagcctggcgaaagactgagacttcgtctcaaaaaataagtaaataaataaataaaaagatgctttgtccccaatcccaaattatttacagtcttgcattgttaagcgacaaggatacgctctaagaaacgcattaggccatttcggcactgtgggaacattctagagtgacttacacaacctggctgccatcacctgctatgcactaggctgaatggtacagcctattattcctcagctacaaacctgcacagcatgagactgtactgaataagacaggcagtggtagcacaatggtaagtacttgtgtctctaaacatatctacatatagaaaaaatacagtaaaaatacagtattctaatctaatggggccactgttatatatgtggtctgtggttggttgatatgtcattatgtggcaaaagactgtgttccaaaaagtaagattcggccagccatggtggtttatgcctataatcccaacactttgggaggccaaagcaagaagatcatttggggccaggagattgacaccagcctgggcaacaaagtgagactctcatctctattaaaaattaaattttttagccaggcacggtggctcatgcctgtaatcccagcactttgggaggccgaggcaggcggatcatgaggtcaggagttcgagatcagcctgaccaagatggtgaaaccccgtctctgctgaagatacaaaaattagccaggcatggtggcaggcgcctataatcccagctactcgggaggctgaggcaggagaatcgcttgaacccagtaggcggaggttgcagtgagctattgccactgcactccagcctgggcaacagagcgagactccgtctcaaataaataaataaataaaaataataataattttttaaaggtaggctttattttagaataaaaggatttaagaaaataaatatatcacagtaagtactattattacatctatgcttcacagataagagagaagcttgggccaggcgaggtggctcacgcctgtaatcccagcactttgggaggccgaggcaggcggaggtacctgaggtcaggagttcaagaccagcctggccaacatggtgaaaccccatctctactagaattacaaaaattagctgggtgtggtggcagacgcctataatcccagctaccagggaggctgaggcaggagaatagcttgaactcgggaggcggaggttgcagtgagccaagatcatgccactgcactccagcctgggtgacagagggagactccatctccaaaaaaaaaaaagagaagcttggaacagctaaagcacccaagtttgcagagacgtaagaaacagctgggtctggccttgaactgtgtcagccttattccaaagcctagtgtcttttccccaccccatgctgtcacagctgctagttccaccaagattgctatataaaggaaaagggggagcgggggaatctcctctccacccccagctttccttttcagcaacacattagaggagcaagccacaaagatgatgtctcagagctcgatataacctggagagaagccagcacaccagctgtcggcagaacgaccccaagggcgcccccaacgtggttttcccaagaggacagctcattggtgccaacatcagcacccccactcccaggtcaccctcccacgaggcaaaggaacacctaggaatctgggctgctctggcaaaacgaggtgctctgaggaccccaaaaacggcagcttgtccttcaggagagctttattaaacaaggcactctgagaagtacaagctcccgaaaaactgcaacaaaaacgtccctcgctggaccgctcacctcaccgccccagcactcaaaggctgaggcaaggtcccagccctgccagccccctgggatgtcgccagctaaggtgaaaccaacaactcacatattactcgtccaccacagaccttccttcttcccttgttcccacagagcaggtcctggtgggtgctggggtacagagctaagaaaacacagcctctgtccatcaggaccttaaagatgagcgagccagcaggctgcctgctcagatgctcaaaatttccatgatgaaacacaatgctctttcttaaaaatagcatcctcattccagtaaaccagcattcatggtggagtgtggctctgctaaggtttcacttctagtaactcattcttgttggcccctttctaagttgtccaaaagccagagacacacacagaagcctcaaggagtccaaccactctcgccactcctgtttccaagtgcaaatcacccatgctggccatcagtggacactcactgaatacattttgaatgaatggaggaagcaaagagggagggggagaggaaaaggatgggagaaaaaggggaaggaggagaggagcgaaggaagattcatttgacagaaagcgcatcaccgtatttgcagaaaccttactggatggtgaagactgactcctctaagagccagtaattctctccctatcctataataatctagtaatgactgtcttcatagttgtacagttctaatgaaagatgaaaaatgaatttaagagaatcacaaactgtcaggttgactgtttatacaaaatttttgttctgttttgttttagcagaagtttccagacatcaagctatccggttacagttatgctatttattaattacttagcctatcacctttgtgcatatgcacaaagtacaggtcactcactgcactatgggagcaagagattggaaacaaatctaaccatttgtttcagtcccttcccgctactataacaaaataccttagactatgtaatttacaaacaaggaaatgtattgctcatagttctggaggctgcaaagtccaagatggagacaccaatagattcagtatctggtgaggcccattcctcatgcctttttttttttccagacagagtctaattctgttgcccaggctagagagcagtggcacgatctccactcactgcaacctccacctactgggttcaagccattctcctgccttagcctcctgagtagctgggattacaggcgtgcgccaccacacccagctaatttttgtatttttaagtagagacggggtttcaccatgttggtcagactggtcttgaactcctgacctcgtgatccgcctgccttggcctcccaaagtgctgggattacaggcgtgagccactgtacctggccttttttttttaatttttttttaaattaaaaaatctgtattacccaggctggtgtacagtggtacaatcacagctcactgcagcctcaaactcctgggctgaagcaatcctcttaccttagcctcccaagtatatgggactaaaggcatgtgccaccatgcctggctaattttttaatattttgtagagtgagggtctcactatggtgtccagggtggtctcaaacacctggcctcaagccatcctcccacctttgcctcccaaagtggtggggttacaagttgtgccaccatgcctggcccctcatgcctttttcttttcttaagatggggtctcactctgtcgcccaggatggagtgtagtggcatgatctcagcttgttgcagcctcaaccttccaagctcaaccaatcctcccacctctcagcctcccaagtagctgggactataggcaagcacaatcacacctggctaatttttgtaattttttttttgtagagatggggtttcaccatgcagcccaggctggtctcaaattcctgggctcaagtgatctgcccacctcatcttccaaagtgttgggattacaggtgtgagccaccccactcagcccctcctgcctcttttataagggaattcatgaggattctgccttcatgacccaatcacctcctcagtgcccaacttcatacaactatcagatttagggagaagggatacattcagaccataacaccgttcatcaaaggaagactggttaaataaacagggataagccataaatgaaattcctaaccccctctaaagcataaggtcctcttccggttccaggcacttcgggagctgtgggttcggtgcagacatgtccaagtccacatacaaccacacacaaccaggcccgaaaatggaacagaaatggcatcaagaaatcccagtccacgtgtatcccattttggtttttttaagaagaaatttaaaaaagaaagaaagaaagaaaggaagaaatcccagtcacaaagatatgactttcttaagtgggtgaaccccaagttcctgaggaacatgcactttgccaagaagtacaagaagaagtgcatgaagaagatgcaggccaacaccaccaaggccctgagtgcacacgccgaggctatcaagacccttgtaaagtccaaagaggttaagcccaagatctcaaagggtgtcggcagcaaaattcatcgacttgcctacattgcccactccaaacttgggacgcatgctcatgcccgcactgctaagggtcttaggctgtgctggccaaaggccaagaatcaaaccaaggcccagactgcagctccagcttcagttccagctcaggctctcaaaagtgcccacgcccctaaaaggcttcagagtagagatctccatctgcaaacatgaggacagaaggattggtatgacctctgggctgccgtctgcatggggttggtatcttcctgtgctatttgtacaaataagcctgaggcagggggaaacaaacaaaaaaaagaataaaatagcgctgtgtgcacaaaatgacccaatctgcaaaatacacaaaaccgaaaagcaaggggctaaaaggtgtgtgtaggatgctattctttgcacgaaagcaagaggacatacatgcagggagacgcttgcatgagcacagacaatctccacgacgagctaataacactggctccctttcaggaagaaggagtagggagaacttttcctgtatattcttttagtaagatttgcattttttacattctacacatattgtctatgggactaaatgtttctgcagctaaattcataagagtaagcattattttattaagcgcttacccggtacaaagtactattctaggtcctctgggaccaaacattggaacagaatccttgccttctccttcctcacaatctcattgcaaaactggagtgtttggcacaggataaaataagaactttgtgttacctgagccaaaagcccatctcatttaaccaatttgattgttaccacattcattcagtcttcacctgcactgaatataacttacaccttttaatacaggacttatttgactttcaagtcaatagatactgaacacttagtaacaacaacaaggcaagtaatagcagcttcctttttgtcactcctccattcccaaagtgtgccctgagtgtttgcacagtggccagccctcgcctaggcaccgggcattcagtagcgaacaggacagacaaggccctcctcccatggaccttgtagcctagtggagggagacagtaaacaacttccaaagaaaataaggccaggggccagagagtgaatgaggaaggggtgtggctccgggaatgggtggccagggaggtgaggggacagtttagctgagtgccaagaagaagctgccatgcacccatacaaggaagtgcaatccaggcagatggaactgcacaggcaaagatccggaggtgggaggcagcctggcactcgcaaagcatgcaaagactggctgcagcagaaatgcacccatcacggggagaagataaaggacaaggagggaggagatggggggcggacaacacagggctttgtcaccagggcaaggagtctagatgttactccatacacagtgtggatcatttgaaggttataagcaggagagtggaatgatctcatttatagttttaaaaggtcccccaggccactggtcagagaaaacactgcagtgagcaagagctgaagcagataatgggtatagggtttctttttatgggaatgaaatgttctcacattgtagttactcttatttttttttttgtcttttgtttttgtttttttttcctttttctggagaacgaggtctcgctatattgcccaggcaggtctcgaactcctgggctcaagctatcctcctgactcttgcttccctgagagctgggattacaggcgggagccaccgcgcctggccctcacattgtagtgatagctacacaactctacaaatacactaaaacttgctgaattgtacactttaaataggtgaattataaggtatatgagttatgtctcaatgaaactgttatattaacaacaacaaaaaaaacagaaacaggaattatttatgaggctggtgccatcatccaggcaagactatagagcagtccagactaaggggggtggcagtgggggagtgaggagtagggtactagggtacagactctcgatatgttatagatgtagaaatgcacaatctctaaaatgtcaaaaatgaaaaagaaatgcactgtctcatttaatgttcacaacaatcctacaaggtactagcaccattcccattgttacagtggataaagtgagccccagaggactcagtgacctgcccaaaatcatctgctacatccgctctctctcctactaacgggtagaagcaggaatggagcccaggcctgtctgatccagaccctgggctaagagctctctgcatcctgcactaccatgaacagcctcacctgcacaattctttcacagcaatactttttttcccagtctctcagttcacaaattggaagcgtctttggggaccatcaagagtgactgttcggtccatgcaggagctctcttgccccgtacccattcacctttgagccacttatcaatttactccctctcagtgccaacatcacccttgaatacctgctctgccacaatggacagatttcctttatgcctctctcccttatgaattatttcctttgctaattacacagattactaatctaccatgtcactctttgcacacgtgtggggcccaatatatatacattcagccttaccaaaagtacgtaaccccagttggactaagaagcgtattcacagaaaaagaatacaaaagatactactcacagtattattgctggggagtgaaaaaagagaattgttggatgaataaagtcacttgacttgtactttttgctgtacccacttctgcatattttaatttcttatgaacatgtattacacttttcaatattgattttaaagatgatattaactaagcaaaaaactaagcagaggtactgtggtcctaaacttttgaacttgtatgcttcaaggactcatactacgggatacaaaaccaaacacctccacgggacaggcaggtaaaataagtaagcgaaagagccaggtgtggtggcgcagatctatatcctatctatatgctatactctatatcctaagtatctataatcccagattcttaggagactgaagtgggaggatcacttgagcccaggatttcgaatccaacttgggcaacatagcaagactcagcctctaaaacatttttttttttttttttgagacagagtctctctctgttgcccaggctggagtgcagtggtgtgatcttggcccactgcaacctccacctcctgggttcaagcgattctcctgcctcagcctcccaagtagctgggattacaggaacccaacaccacgcccggctaattttttgtatgtttagtacagacagggtttcaccatgttggtcaggctggtctcgaattcctgacctcaggtgatccacccacccgtgacctcccaaagtaccgggattacaggcgcaagccatggtgcctggcctaaaaaattttttaaaaagtaagcaaattgaactgcatatagattggggcaagtagggcagcacaagctccatcgaaagtgtatgcctctcggccaggcgcagtgactcacgcctgtaatcccagtactttgggaggccgaggcgagcagatcacctgaggtcaggagttcacgaccagccttgccaacgtggtgaaaccctgtctctactaaaaatacaaaagttagctgggcatggtggcgcatgacacacctgtagtcccaggtactcgggaggattgacgcaggagaatctcttgaacctgggaggcggaggttgcagtgagcagagatcacaccactgcactacagtctgggcgacagagcaagactctgtctcaaaaaaataaataaataaaaaacaaagtgtatgcctctctcctttacagtgctccagtgttaagctttctcagtagagaatgctggagggaggctgggcgcggtggctcacgcctgtaatcccagcactttgggaggccaaggcgggtagatcacttgaggtaggagttcgagaccagcctggacaacacggagaaaccccgcctccactaaaactacaaaaattaaccaggcgtggtggcaggtgcctgtaggcctgagtcccacctattcaggaggctgagacaagagaatcgcttgaacctgggaggcggaggttgcagtgagctgagatcacaccactgtactccaccctgggtgacagagcaacactctggagggacgcgtgtgaaccaccagctatgactcaccagccccacctgcacttggaaggttgcctccccctttccccatgggtgcagaccagttctggccctgcaagcccgccaactttcttgccatccaacagtctggaccccattgtccccaaccaggtctgaaccctggccccagagagggtccccttccaagtacgtcctttcttaggtctactccctcagtcctagactgccatagagttttcttctatcctacactcactctttttttttttttttttttgagatggagtcttgctctgtcgcccaggctggagtgcaggtgacacaatctcggctcactgcaagctctgcctcccaggttcacgccattctcctccctcagcctcccgagtagctgggactacaggcacccgccaccatgcccggctaattttttgtgttttttttagcagagacagggtttcaccttgttagccaggatggtctcgatctcctgacctcacctacactcactctttaatcatggttgtaaaagtcaatttcctccatcttctttcccaggggtttagctgagcccaatcccatctctgaatttcaggcatgatgtgcgcaggctccaggcttagccagggagagccctggatgttctggacatggtgacaggcttgagaagggacagtgagacccctggctgggattttgctagaaatacttggaaagatgtgttcttctccctggggttgctaaggtagcagaaaacatgcctgggcaggggacagacatcctgttcccattgagggactagtcggcctgaaaatgaagcccccaaggaggacagcagagacaagaagttcccgatagccttgagagactgcaaagattcacccacccctggactttcagtctcagagtcaataaaatagcttttgttgtactttactttgctcaagccagtttactttgtttcactgttatttatttatttagagacagggtctcactctgttacccaggctgcagtgcagtggcgagatcatagctctctggagcctcaacctcctggactcaagcaatcctcccacctcagcctcccgagtagctgggactacaggcatgcaccaccacacctggcatattttataattttttgtagagtcaggggtctccctacatagcccaggttggtctcaaactcctgggctcaagcgatctgcccacctcagcctcccaaagtgctggggttacaggtatgagccaccacgccccagccaacacaaaccaattttagttgggagtctgtcagccactatctaaaatcttttaagattcctgtctggcaggccaggcgcggtggctcacacctgtattcccagcactttgggaggtcaaggcgggtggattacctgaggtcaggagttcaagaccagcctgaccaacatagtgaaaccccgtctctacaaaaaatacaaaaattttgtgttgttgtttttgttttttgagacaaggtctcattctgtcacccaggcaggactgtggtggcaccatcatggctcagcgcagcctccttttccccaggctcaagtgatcctcttgcctcagcctcccacgtggctgggactacaggtgtgtaccaccactcccggataattttttttattttttatttttagtaaagacagtctcactatgttgcccaggctggtctccaactcctggtctcaagcaatcctcccagttcagcctctcaaagtgctgggattacagatgtgagccacaatacccggccccaattctaatgtttaaagagtacagtctacaccttaaagcctgcattttatcatcctgtcctcactgctctgacttctttacagttgtgctgtccaccttggcggcttctaccacatgtggctattttaagtttcaattaattaaaattaaattttaatttaattaattaaaaataaattttaattaattaattaaaaattaaaaattccttttccctggccacactgagtgctccatagctacatgtgaccactaactacggactagactgtgcagacacagaacattccatcatggctgagagttctactgggcaacactgctggagagcatccctttcaagacacctccttccaccttactcttgaactgatgtcaatggcaaaggaagcacacacgaacattagtaagtggagctcacaggccaggcgcggtggctcacgcctgtaatcccagtactttgggaggccgaggcaggcggatcacgaggtcaggggatcgagaccatctgaccaacatggagaaaccccatctctactaaaaatacaaaattagccaggcgtggtggcgcatgcctgtaatctcagctactcagggggctgacacaggacaatcgcttgaacctgggaggctgaggttgcagtgagccgagatcacaccattgcactctagcctggacaataagagcaaaactccgtctcaaaaaataaaaataaaaataaaaaaggaagtggacctcacaatggagggaaactcgcctgaacagagtttcccaaacttcagccattttcatacacacatgggatttctatgatctccaaatacctctagcttctacctacacaattttgtctaaatttgatcaccttacatcagtggttctcaactacaggcaattttgcacccccagggtgggtatctggcaatatctggaaacactgttgtctgtcacaactccaagatgctactctcatctagtggatggaggcagccaaggatgctgcgagacaccttacaatgcacagacaacctccacaacagagaagtatccagcccaaaacgccacttgtgcccagttgagaactcctgctctaggttttatatataaactatttgtttaaaatggattcactccatttacataaatgtattttaaatgatagcctctggccaggcatggctcacacctgtcatcccaacactttgagaggccgaggcaggaaaacagcttgagttcaggagttggagaccagcccgagcaacacggtgagacctcatctctactaaaattcaaaaataattagccaggcatggtggacatgcctatagtctcagctacttggggggctaaggacgaaggattgcttgagcccgggaagtcgaggctgcagtgagccctgatcatgccactgtactgcagtctaggggacagagcaaaacactgtctcaaaaaaaaaaaaaaaagataacttcatgccattaccataactagaaaccagtatcacttgccataaacagaagataaataacaaaaccagcacaatgaaaagcaaagtgtgttactccactccagctggctgctgcagctggcagtgcctctgagccagaagcctaccctgctgttgctcctcctcctttacttttttttttctttttttgagacgcagtcttgctgtcgcccaggctggagtgcagtggcgcgatctcagctcactgcaacctccgcctcctgggttcaagcaattcttgtgcctcagccacccaagcagctgggattacaggtgtgcaccaccacgcccagctaacttttgtatttttagtagagacggcgtttcaccatgttggccaggctggtctcaaacacctgacctaaagtgatccagccgcctcggcctcccaaagtgctgggattagaggcatgagccgccgcacctggcccctcctttctttattgctgagaagttagcaagtgtttggtgttaaaaagtaggccctgacagggctgtaaatactgaagggaaactgaaaaataaataagcgtcttgctaaatgtctcaatgtgagtcagttcctgcccatgaattccttaaatttatcactgcagcacccagaaccattgcctgcccagcattttggaactgttgtcccacggtagaaaccttgagcttggtggcaaacttactacaagtgaccaaattcccccacatctgtccaaacaagagaagtgacagccagcctccctactgaggagtggatttatacatgcagttctcttcctggggaagctgcagccacaccctgcgtgttgcatgcatggacttcagctccctggtgccccagggttccagaggagcagtggcccaaagctgtgttgtggcagctgtcacgttggtgttgtgggtgctgctgttgttccttaacaccaaactgaaactggaccgtctgacactgccatgacaaataaacttccatcccacattccagacaggctggggagatgggctgcaagaccgaaactgatttttttttttttttttttttgagacggagtctcactctgtcacccaggctggagtgcagtggcgggatctcggctcactgcaacctctgcctcccggattcaagcgattctactccctcgacctcccgagtagctgggattacaggcgtgcaccaccacgccaggctaatttttgtatttttagtagagacggggtttcaccatattggtcaggctggtctggtcttgaactactgacctcgtgattcgcccgcctcagcctcccaaagtgctgggattataggcatgagccaccgtgcccagcccaaatcctttaagagtaagaaattaggccgggcacggtcgtcacgcctataatcccagcactttgggaggctgaggcgggcggatcacgaggtcaagagatcgagaccatcctggccaacatggtgaaaccctgtctctactaaaaatacaaaaattagctggatgcagtggcaaacacctgtagtcccagctactcaggaagctgaaacaggagaatcgcttgaaccctggaggtggaggttgcagtaagccgagattctggcactgcactccagccttggtgacagagtaagactccatctcaaaaaaaaaaaagttatttttccagatgaaaaaggaaaatatgaaataactttctcacccattgataacagccattcaactaggttaaagtgtaagtttataaataacttcgtttacactgcttcctgcttagaccatttatttattattttatttattttttgtttgtttgtttttgagacagggtctcactctgtcacccaggctggaatgcagtggcccaatctcggttcactgtaacctccgcctcccaggctcaagtgatcctcccatgtcagcctcctgagtagctgggactacaggcctgcaccaccacagccggctaatttttgtatttttagtagagatggggtttcaccatgttggccaggctagtttcaaacgcctgacctcaggtgatacacctgcctcagtcttccaaagtggattacaagcatgagccaccgcgcccagcctagaccatttatataaaggaaaaccaaaattgattttcttaggatttgactttaagacaaataaaggttttaacagcagatagtctgctaaccagatgtgcaatggtttcatacaatctggctgaaatgcaaaagcaaatattagaggagcagagccaagggaacaatgtttctgaaaaaggtaactaatgtaacaaggagttggcctccacagaaaccatcatctctgctgggagttcccctataatcagttagcactgcgcaaatatttgctgaattgtctgcatgacacaccaaccttccaggaagttacagggtccaggaaagaacagtctcagcattgacgctgggcagatccaagaagaacatgaagaaaaattaaaagtagccagatatggtggctcatgcctgtaatcccagtactttgggaggccgaggcgggagaatcacttgaggtcaggagttcgagaccagcctggccaacatgacgaaaccttgtctctactaaaaatataaaaattagctgggcatgggccgggtgcagtggctgactcctgtaatcccagcactttgggaggccaaggcgggtggatcaagaggtcaggagatcaagaccattctggccaacatggtgaaaccctgccgtctctactaaaaatacaaaatttagccaggtgtggctgtagtcccagctactggggaggctgaggcaggagaattgcttgaacccgagaggcagaggctgcactgagccaagatcatgccactgcactccagcctgggtgacagagcgagactccgtctaaaaaaaaaaaaaaaaaaaattagctgggcatggtggcgggtgcctgtagtcccagctattggggagactgaggcaggagaatcgcttgaacccaggaggaagaagttatagtgagccaatattctgccactgcactccagccagagtgagattctgtctcaaaaaaaaaaaaggaaaaaaattaaaagccgttatgaattagtcaacagcagtggttctcaatagcagggcggggggattttgccccctgcagacatttggcaatgtctagggatgtgtttgattgtcactactacagggaagtagggcactactggcacgtagtgggtagaagccagggatactgctaaacatcctacaatgcccaggagaccccccaccagagagtgtaatctggccccaaatgtcaatagtcctgcggtggagagccctgctctggagcagctctgcccactaggcttctgtgatgatggaatcattctatactgcaccatcatccagcacagtagccagcagccacatgtggctgctgagtacccaaaatgtgacatttaaagtttatttcaatacccaaaggaatatacatcattctaccataaagacacacgcacacaaatgttcactacagcactattcacaaagcaaagacatggaatcaacctaaatgcccatcaaagacagactggataaagaaaatgtagtacatatgcacatggaatactacgcagccataaaaaagaacaagattgtgtcttttgcaggacatggattgagctggaggctattatcctcagcacattaacacaggaaaagaaagccaaataccacgtgttctcacttataagtaggagctaagtgataagaacttacaggcacaaagaagggaagaagagacactgggggtctatctgcaggtagagggtgggaggagggagaagagcagaaaagataactgttgggcactgggcttaatacctgggtacagcaaaccccggtgacatgagtttactgatgtaacctcaggtacgtagccctgaacctaaaataaaagtttttaaaattttttatttcattcacttaactgattgaaatagccacgtggtaccattatggacagcagttgttaagagggcagttaggagtggaaggaggctgggcacggtggctcacgcctgtaatcccagaactttgggaagccgaggcaggcggatcacctgaggtcaggagttcaggaccagcctggccaacatagctaaacgctgtctctactacaaacacaaaaatcagtcagggctgggcacggtggctcacgcctgtaatcccaacattttgggaggccaagacaggcagatcacgaggtcaggagattgaaaccatcctagctaacacagtgaaacctcgtctctactaaaaatacaaaaaatgggccggacatggtgggggacacctgtagtcccagctactcaggaggctgaggaaggagaattgcttgaacccagaaggtggaggttgcagcgagccaacatcacgccactgcactccagcctgggcaacagagcgagactccatctcaaaaaacaaaaacaaaaatcaatcaggtgtggtggcgcacgcccgtaatcccagctactccagaggctgaggcaggagaatggcttgaacccaggaggcggaggttgcagtgagccgaggtagtgccattgcactccagcctgggcaacagagcgagactccgtctcaaaaaaaagagaaaagaaaaaggagtggaaggaaaggtatgaagggaaacttttgctcttccttctaaatacatctaaggtctgggtttttcgtttttttttttttttttcctgtttaactaggagaatacaaaacctaagtcaggaaggatgcaaagaaagaagcgaagtctgaagtctgaacacatccctgccacagaaatgctactgtctggaggagaaatgggaatatatcaatcacctcatgagaaaagccaagtcaatgtggcagcttctctttaaatgtaaagctcaggtcctctgacccagcaagtcctgccagagggaggtagggagcgatctctggtcctatgggagatgcacgaggatgttcacagcggcaatagacagggcaacaccccggaaatgacaaaggcaccccctgtgcaatggatttgtaccaattgcaagaaggaagtagagacatatacactccagggaaagatccaggtggttaaatgggaagaaaaaaagaaggcaagaaacatgtaatttattattttgtattttaataccaaaatatgtgttaatataagcctaggaaaaagcactgaggaacaaacacctcctctgccccatgactgttaccacaggtgcttccagcagatgggcagtcagggatgctgggactgtcgcctttccctgtttctccatctctgagtcttccctgtgggtattctgctgctcagcagacctgactcctcttatagaagtatgactcgtgtgttgacccactcccacaaagatcctacagctatcagactcaagtccaaggctctcaccttctcaccttttcatctctgctgtccctttaccaagccaccctcctgcagccaaggcaggcatgccccggaaccctatgctctcatctttccccaccattccatttctatcaaactacccaacatgtctgtaagacccactcacaccagacatcctcctgcaagcctgtccctttgtcttctatctatccttccaaacccaactctgtgctcttcacaaggagaggaggaagcagttctgggctctcttagactctactggtctgtttctctctagaccaggactggcaaactcaaacctacaggggcccagcaagccacataaaaaaatacataggccaggtgcagtggctcacgcctgtaatcccaacactttgaaaggctgaggcaggaagatcacttacagccaaaagtgtgagaccggcttgggttacatagtgagatcccatctctatttattttttaaaaatggaagaagaagaaaagaagaaagaaggaggtggagaaggaaagaaagaagagaggagggaggaggagaaaaaacaatgaatgaaaataaacacagggtccagtgggatggggcacaccgccagtccagttcctacacaagcctagaccatctgattctgcaagacaaagacattctgtaagcaaatattcagttataaaatgttggcaactgattcaatttttaaatattatacaaaactaaaaccacaccaagatatcttttttttacgaccaaagtcaaaaatcttaataatggcaaggatggacaaataggcgctgtcactgccagcaaggatccaagatggcatcacctcagggaggacattttgacgatgctatcaaaattacaaatgtaccttcacttcagccattccccttccagatattccgtgcagtctaacatgggcacaaagacttgtgtgacatttctagtaatagtaaaccattagaaaaaataaatataactgaccaagctcagtggctcacgcctataatcccagcactttggaggcccaggttcacttgaggccaagagatcaagaccagcctgggtgacagcgcctctaaagattagatagatagatagatagatagatagatagatagatagatagacagacagacagacagacagacaaataaaatggaaaaataatctaaatgaccatcagtggtagactggctaaacaaactacagtactattcaatttaatactacaaaggcattaaaataatgatcaaaggccaggtgcaatggtgtgtgcctgtagtcccagctatttgggacgctgaggcaggagaatcacttgaacccaggagtttgagacagcctaggcaacacagcccccacatctcaaataagtaaataaataaataatttcaaaaagggaatgaagaaggttgttatatactgacacggaacgagctcagaattttttttttttgagacggagtctcactccgtcacccaggctggagtgcagtggtgcgatctcggctcactgcaacctccgcctcccggattcaagcaattcttctgcctcctcagccttccgagtagctgggattacaggtgcccaccaccatgcccagctaagtttgctatttgtagtagagacagtttcaccatgttgaccaggctggtctcaaactcctgaccccaggtgatccacccaccttggtctcccaaagtgctgggattataggcgtgagccactgccggccagaatgtactgttaagtgaacaatacatgtactgtgtagggtatattaataatagaataaaaacaaaaaatctatgtctatttatctatataaagatgcatggtttttttgataaatgcttaaaaatttctagaacaatacagaagaacatggtaagactggctgcctggggaagggtacagggtagctgactagagagagtgggagggaaactgactttgcaatggctacacctctgtagcttttaagtattaaaccatgtgactctgactcagtacacttttttctaatctaaaaataaaataggccgggtgcagtggctcatcctgtaatcccagcactttgggagataggcagatggcctgagctcaggagtttgagaccagcctgggcaacatggtgaaaccctgtctctacttaaaaaaagaaaaaaagtccaataaaattagctgggtatagtggtgggcacctgtaatcccagctacttgggaggctgaggcgggagaattgcttcaacccgggaggcggaggttgcggtgagccgagatcgcaccacttgcactccagcctgggtgacaaagcaagactccgtctccaaaataaataaaaataataataaaataataaagctcaccccgctgcccaaacagcacacagctctgtctgcagcctctgatcttgccatgagcttgtaggtcagagagcagacaccattcacctcccccaggcctggcacacaaacgtgctccgtcactaagcgtgggctgatgactcattctcctgggccctttcacatgccccagtgcccagcactcctccctcacctcatgcatttgtgtttacccaagacactcggtcataggttctaacacagacctaggccacagagcctggctggcaaccccacacagcacgagcccaaaaaattccagaaaacaggacagaatccagtggaaggcaatttcctagacaccaaaacaataagcaaaaacatgagtaagtgctgagtgtgtgccaagcgctgtggcaaagccctcaacgcgaatgacttgccttgctcctcccgactgtcctacatcaagggcttctatcctcgccctcttgtagatgaggacactgcacctcagagggtcttgcagcccataagggacagagccaggatgtgagtccagcaggctgaccccggagccagccctcttagctggagtctggcaatctcatctcgttgtagaatctgagagccacctctcaattgtctagatggcaacctagggaggaatccaaatggcaggaacccagcagagacacaccaagggtccccactggcactgccaagcccacctgcctcctccctccaagcctgctatggcagctggcactgctatgggagcgtccatgagcaacacacattggggtctaagagctctacgtccaacaagaggcaggaggctggacgtggctccttccttgcagccatgggtcacgcggataaagaagggaaggaagaagggaggggcatcaggaaggaagaattccctttttctctgcagatgaggattccattgtttatcctccttctggctccagtgctcaacatgtaccctcactgaagcccattgtgggccctgccaccacttatacccccaatgaattaggaatgcaaaactcttgagattttttaacgtttctgggttttttttgttttttttttttttttttgagacagcgtcacactccatcccatgctggagtgcagtgacgcgatcatggctcactgcagcctcaaacccctggactcaagggatcctcccacttcagcctcccaagtaactgagaccacaaacatgcaataccatgcccagctaattttttatttttcttggtagagatggagtctccctatgttgcccaggctggtctcgaactcctgggcttaagaaatcctcccacctccgcctctcaaaatgctgggatacaggcatgagccaccatgccctgttgctcctattcctttttgtttgttttttgtttttgttttgttttgttttgagacagagtctcgctctccccaggctggagtgcaatggcgcaatctcggctcactgcaagctccgcctcccgggttcacgccattctcctgcctcagcctcctgagtagctgggactgcaggcgcccaccaccacgcccggctaatttttttgtatttttagtagagacggggtttcaccgtgttagccaggatggtctcgatctcctgacctcgtgatccgcccgcctcggcctcccaaagtgctgggattataggcgtgagccaccgcgcccggccgctcctcttctttattcactcgctcatttaatcaagcagccagtatttactgagcacctactaggtgccagcctttgtgctaagcactgggattctcacaagacaaacgagggcactgctctcacagagcctacattttgtaggtgggcaaggtaggaacaacaacaaaaaaaaaaaaacaagaaaaaaaaaatatatgctactcagcggtaggtggctcctacagagtgaatggtctggaaagatgtcccaaagacacagctgagctgagacctgggagacaagagacagcagcttacgagctgtgggaccctggactagttaattaaccctgctaagcctccgtttcctggaaaataaaacaatgacagtacctagtattggacgatgccattaagacaatccacttaaaatacctaagacagtgatgctggcacccaagacaccaacggagtttaacaaaattcttacaagaaaaactactgtgtgtcactagaacggaagccccacactgtcagggatttctctcgcacgtgttgaccactatatccctaatattaaaactgccagagacagagtaagtgctcaggaaatatttatggagtgaataaacggatgaatcaacagtagctatttttagtcttcatgctataaacctctgttaacttttctgtgagtgtgtagagatctggatgccctttcaaacagccggcaattctctgaaatatccaaaaacaaggccaagattcttaagcactggttttctgtggtatcacacacaaaactgcatttttgagtgcttctttgttggtcaggcttatccgatcccagttaggtgacttctcaggccccgggcaggagtcagtgcctctctctactttctctttgtttgctttaggaagggccaggattcagaatgaaaacattacctgtggccgggtacagtgtctcatgcctataatcccagcagtttgggaggccaaggtgggtggatcacctgaggctgggagttcgaggccagcctggccaacatggtcaaaccctgtctctactaaaaatacaaaaatagctgggggtggttatgcacgcctgtaatcccagctacttgggaggctgaggcaggacaatcacttgaacctgggaggcagaagttgcagtgagccaggatggcgccattgcactccagcgtgggcaacaagagccagactctgtctcaaaaaaaaaaagaaagaaagaaagaaaagaaaaagaaaacattacttgtaaagtgaaaataaaatacaaatcaacttgtgagactataaggcactggttaagtaaattagagatgtctattcaaagaaatatgctgtcattcaaaatgtcatttgcatatggcaaaaccctgtctctattaaaaacacaaaaattagctgggcgtggtggtgtgcacctgtagtcctagctacttgggaggcagaggcggaggcaggagaatcacttgaactcggaaggcggaggttgcagtgagccgaaatcatgccattgcaatccagcctgggcaacagagtgagactccgtctcaaaaaacaacaacaacaacaacaacaacaacaacaacaaacccacgttctacatggttcctagtcataaaacaatgtacacgcagaaacaaacaggaagaaaacatcatctgctaaaaggtttgtgttcattgtgattgtctttgaaggaaaaataacataataccagcatttcctttatcagttttctctgttctctcatttttctttttctttctttttttttttttttaatgagactgagcctcgctctgtcacccaggctagagagcagtggcacgatctcgactcactgcaacctccgcctcccaggttcaagcaattctcctgactcagcctcccaagtagctgggattacaggcatgtgccaccatgcccagctaattttggtttttttttttccagtagagacaggttttcaccatgttggacaggctggactcgaactcctgacctcaggtgatccacccacctcagcctcccaaagtgctgggttacaggcacgagccaccatgcccggcctgttctctcatttttttttacatagatatgtactcatttttcaattagaggaaaacaaagattagactttttcactgctccccttataacataaactattcaagaagagagtgcctggccaggccctggagcctggagccccacaggaggacagaccaccctgacttgacaatttaagctcagtgttcctgtgacttggctaacctatatgtctaaaactcaatctcagatacagaaaaggaagccaacgctgggcgcggtggctcatgcttgtaatcccagcactttgggaggccaaggcaggtggatcacctgaggtcgggagttcaagaccagcctgaccaacatggagaaaccccgtctctactaaaaatacaaaaaagtagccaggcctggtggtgcatgcctgtaatcccagctacgcaggaggctgaggcaggagaattgcttgaacccaggaggcggaggttatggtgagctgagattgcgccattgcactctggcatgggcaacaagaacaaaactccatctcgggaaaaaaagaagaataaatttcttaggtcaggcatggtggcacaggcctgtattcccagcactttgagaggccaaaagtggacaaatcacctgaggtcaggggtttgagaccagcctggccaacatggctaaaccctgtgtctactaaaaatacaaaaaaaatcactgggcatggtggtgcatgcctgtaatactagctagtaggaaggctgaggcatgagaattgcttgaacccagaaggcagaggttgcagtgagccaagaccacaccactgcattccatcctgggcaacagagtgagacactgtctcaataaatacataaataagccgggcatggtggcccatgcctgtaatcccagcactttgggaggccgaggtggatcacttgagatcaggagtttgagaccagcctgtccaacatggtgaaaccccatccctactaaaaaaaaaaaaatacaaaaattagccaggtatggtggcatacacctgtaaccccaactactcaggaggctgaggcagaagaattgcttgaacccaggagccggaggctgcagtgagccgagactgcaccactgcactccagcctgggcaaaagagtgagactctgtctcaaaaaataaaaaataagtaataaataaataaatttattggctgggcgtgatggctcacgcctgtaatcccagcactttgggagaccaaggcaggcggatcacaaggtcaggagttcgagaccagcctgaccaacatggtaaaaccccgtctccactaaaaatacaaaaattagctggcgtggtgccacgggcctgtaatcccagctacccaggaggctgaggcaggagaatcgcttgaacccaggaggcggaggttgcagggagccaagaacgcgcctctgcactccagcctgggtgaaagaacaagactccatctcaattaaaaaaaaaaaaatttcttataataccattatactcctatcagaatggctgaaacaaaaggtgacggacaataccaagtgttgatgaggacatggaacaactgaccagcttggtggaagtataaattagtacaattgctttggaaaattatcattttcttctaaagctaaacacaaatataccctagggcccagcaaagccacataatacatactgaatgatgtgttcaagaatgttcatagcagccgggcgcggtggctcacgcctgtaatcccagcactttgggaggccgaggcgggcaggtcacaagatcaagaccatcctggctaacaaggtgaaacctcgtctctatgaaaaatacaaaaaattagccaggcgtggtggtgggcgcctgtagtcccagctactctggaggctgaggcaggagaatggcgtgaacctgggaggcggagcttgcagtgagccgagatcgtgccactgaactccagcctgggcgacagagcgagactccatctcaaagaaaaaaaaaaaagttcatagctgcactattcatgacattaatttcaaataaaagcttaataacactaagagatactgcacatgccaagatggcaataaatgagacgctttctacgttagtttccttgggctgccataataaaatatcatagactggatggcttaaacaacagaaacttattttctcacagtcctggaggccagaaatccaagaacaaggtgtcagcagggttggtttctcctgaggcctctctccttggcttgcagacagccaccttccccctgtgtcctcacacggtcttttctctggtgtctctgtctttttttttttttctttctttctttctttttgagatggagtctcgctctgtcgcccaggctggagtgcaggggcatgatcttggctcactgcaacctccgcttcctgggttaaagcaattctcctgcctcggccttcctagtagctgagattacaggtgcacgccaccacacctggctaatttttgtaattttagtagagatgggatatcaccatgttggccaggctggttttgaactcctgacctcaggtgatccacctgcctcagcctcctaaagttctgggattacaggtgtgagccaccatgcccagcctctctttctgtcttaatctcctcctataaggtcaccgggctggatggaaaagggcccatcctaacagcttcattttaaattgatcacctctttaaaggccccctgtctccaaatgcagtcacattctgaggtgctggggattccagcttcaaacgtgaatttggggaggtgtgggggatccacgtctgcaacatttcccaaatgttctaacagcacaaggcttccttaattactaaatcagaaagctgacctcatagcaagaacaatagtccagactatatgaatttctcatccaacaggtgtcttgagttttgttttcggttttgttttttttttaaaaagacaggatgagacaccttaaaaggactatggccactcagtgagtatcagcttccttagtccagtggctctgagggccattcaccccccagaggacacttggcaatgtctggagacattcttgattgtcacaaggtggggaggggatggcactggcatctagtgggcagaggccagggatgttgctaaacatcctacaatgcccaggacagcctccataacagggaatcatcaaacccaaaatatcggccaggcgcagcatatttttagtagagacagggtttcaccatgttggccaggttggtcttgaactcctgaccttaagtgagccacccacctcggcctcccaaagtgctgggattacaagtgtgagccaccaagcccggccccaagcctgactttatctcatcactgcaaactgcccgtggcacgtgggagatcctgccaggcccacggtaggagcagggcactgttgacactacaaactgattcttccttggggaccgccgccaacaggcttttccttggcatttgctaaatgccacagagatttaattggggcgaaggaagagcatccggcccagtccacctttccaattctcaccagaagcctttccctgctcgcacagggcctcttccaactgtcttcccccagagtttctgcaaattctgtttagacaaaaataaaagcagggccaggcacagtggctgctgcctgtagtcccagcactttgacaggcagaggttggcggactgctttagctcaagagtttgaaaccagcctgagcaacatggagaaaccccatctctataaaaaaatacaaaaattagccaggtatggtggtgcatgtttgtaatcccagctactggggaggctgcagcggtaggattgtttgaacccaggaggctgaggttgcagtgagatcgcacccactgtactccagcctgagcaatagaatgagagtacgtctcaaaaaaaaaaaaaggttttaaatgtataagcacaaccaactatcctatttctttccccttgtagcagtaacattatgtgtttagactgcgccatttcagcatgggccactaattcctaaatgtcaggcatgacttggggtatttacaaatctcaggaacttttatagacttcatggttttctttaaattgactgccttttatttaaattctaaaaggaaacttcctgccatgacacaagaaagcaagtatcatttggtacaaacagaagggctcataaaaataattgctaacctttcatacatatattaatctttcaaactcacaaattagagaaaacagatactagttgttaaaatcagaatcattctaaatgtcatcaataaaaatgttataattagtctttttctttccaaattaaaccaaaatcaccaccttcatgagtgaccctgaagacacgtcccaacccctccaccccttcaaaggcagtcataaaatacagccagcccttatcactgactttcaacatttccatctgggtaaagacactaaaagaacattctgttctgagaagtaagggacaaaagtccaaagatggccggttccatgccttgcctcctttttccaacttattgcatgcaagacagaggtcaaggtcaaagggtgcccccatctccttgcggactggactacagggacctcctctcgccagccagctgtacagtaggtagaaagagcccttttgggctgggcgcagtggcttatgcttgtaatcccagcactttggaaggccaaggcgggcggatcatgaggtcaagagttcgagaccagcctgcagaacatggtgaaaccccgtctctactaaaaatacaaaaattagccagccatggtggcctgcacctgtaatcccagctactcaggaggctgaggaaggagaatcgcttgaactcgggaggcggaggttccagtgagccgagatcataccactgcactccagcctgggcaacagaaggagactctgtctcaaaaaagaaaagaaagagcccgtctgcaaggaagcccggcaggcacggcacccatgtccacactccatccttcagagtccctctgtgggtttgcaacaacacatcttctggtctccacgtgggcagagagcagctagtctggttttggtcagcacaaggcagagcaagggaggacctctgtaactgaaggggatggcgcaagtgcagctgggcgctggcagaggacagagagcacagccccatgggccgctgccaagctccactgttctcatcccaggggggcaaagagctgttggtgcaactctctcctccagcccagagaggggaaggtcggtggctgaggaggggggtgtctctgggtttcacccaccagcacaatcccctccctcaaaacatacccctatatgcttggtatctaatactccctccaccacatcaaagaaaggatgttaaaatgtacacacacggccgggtgcggtggctcatgcctgtgatcccagcactttgggaggccgaggtgggtggatcacctgaggtcaggagttcgaaaccagcatggccaacagggcaaaactctgtctctactaaaaccacaaaaattagctaggcgtggtggcgggtgcctgtaatcccatgtactcaggaggctgaggcaagagaatcgcttgaacctcagaggcagaggttgcagtgagccgagatcgcaccactacactccatcctgggcgacaagagcaagattctgtcacaaaaataataataataataaataaaattaaaaaataaaataagatgtacacacacccctacatgccacatatctaatactatctccactttgtcaaaggaaggacattgaaacacacacccaccccactatatacaattgatcctcataatttataatttctgtatttgcaaattcaccaaatccctcaaacttgtaatcccaaatcaacagctgcagccccttcacagtcactaatggatgcgtgcagtgtagccaaaatggtgagttgctcctccctgccccgcccccagacacacacattcccagctgaggtgacacaaggcttctcattgcagctctcacactacaaataggagtcatttttgtggtctcttactgccacgatttgtgcatttttgtgcttttccctgatggttttgcagtttaaaatggcccctcagcacagtgcagaagaactagtatctctaagcacaggaaggctgggatgtgccacgtggaaaaaatacacgtgtcagataagctgcctccaggcgtgagttacagagttgttgcctgtgagttcgatgttaatgaatccataacgtacattaaatatgcggtttttaaaaaacagaaacacacctaaaacgaggttcttcattgatcagtcaacaaaaataatgtgaccagagcctctcaggaacctaaccccatatttcccctaagagcaatggttccatattcgaaaattcagtgctcacaacgactgaaataaagaatgtaagtactgggcagggcacggtggctcacatctgtaatcccagcactttgggaggccaaggcaggcggatcacctgaggtcaggagttcgagactagcctggccaacatggcgaaaccccgtctctactaaaactacaaaaattagccgggcatactggtaggcatgtgtaatcccagctacttgggaggctgaggcaggagaatcacttgaactgggaggtggaggttgcagtgagccaagatcacgccactgcactccagcctgggcgacagagcaagactccgtctcaaaaaaaaaaaaaaaaatgccaggtgcagtggctcacgcctgtaatcgcaacactttgggaggccgaggcaggcggatcacaaagtcaagagatcaagaccatcctggtcaacatggtgaaaccctgtctctactaaaaatacaaaaattagctgggcgtggtggtggcgcaggcctgtagtagtcccagctacttgggaggctgaagcagagaattgcttaaacccaggaggcagaggttgcagtgagccgagactgcgccactgcactccagcctgagtgagagtgagactccgtctcaaaataaaaaacaagaatgtaagtcctgagagtaatgagagtcctacctaacaccacctccatcacatcaaagagaaagggcatttttgtttccttatcagtaaagcaagaataaaaaaaattaccaacatcaaagggccattgtgcagcatgaaagaggaaacatgagttcagagccaaaacactgcaggtcctaaataaatattcatctttttcctccaccgtcagataatgagtcacataaacatgctgacataagctctatgctctcaggcaaaatgtaggacctctgaaatgcctctgatgcctccacccaggtggcgggcttcctgtctagattccagtcccctttgtgggatggaaagaggagcacgacaatccgttcccagggtctgcagcacacatcggtgtgtgacagcttctcctcattgttgtaacaaattagcacaactttggccgggcgccgtggctcacggctgtaatcccagcactttgggaggccaaggcgggcagatcacgaggtcaggagatccagaccatcctggctaacacggtgaaaccccgtctctaataaaatacaaaaaattagccgagcgtggtgacaggcgcctgtagtcccagctactcgggaggctgagacaggagaatggcgcgaacccggaaggcggagcttgcagtgagccaaggttgcgccactgcactccagcctgggcgacagagcgagactccgcctcaaaaaaaaaaaaaaattagcacaacttgagtggcttaaaacaatgcaagtttattaccctacagttaggtccgaagtccaaaatgggcctcatgggactaaaatcaaggaaggtgtcagcagagccgtgttccttctggaggctccaaccgagtccgtttccttaactcttccaacttctagagtcccccgcattccttggctcatggccccttcttccctcttcaagccagcagtgcagcctctcccaatctttctcttatgctgacactcactctcctgcctgtctttcgcttttaaggaccctgtgataacactgggccgggccagggtcagtggctcacacctgtaatctcagcattttgggaggccaaggtgggcagataacttgaggtcaggagttcaaggccagcttggccaatacggtgaagccccgtctctaccaaaaatacaaaaattaggccaggcatggtggctcacgcctgtaatcccagcacttagggaggccaaggtgagcggatcatgaggtcaagagatcgagaccatctcggtcaacacggtgaaaccccatctctactaaaaatacaattagctgggcgtggtggcatgcgcctgtagtcccagctactccggaggctggggcaggagaactgcttgaaccgggaggcagaggttgcagtgagccaagatcacaccactgcactccagcctagtgacagagcaagactctgtctcaaaaaaaaaaaaaaaattagctgggcgtggcggcgggagcctgtaatcccagctacgcaggaggccgatgcatgagaatcgcttgaacccgggaggtggaggttgcagtgagtagagatcatgccactgcactccagcctgggtgacaagagcgagaccctgtctaaaaacaaacaaacaaaaagatttaaggtgatatatccacaaatggcttttttttttttttttttttttgagacagggtctcactctgttgccgaggctggagtgcagcggtatgatcagggtttaccgccacctacgcttcctgggctcaagcactcctcctacctcagcctcccaagtagcaaggaccacaggctcaagccaccatgcctggctttttttattattattatttattttttgtagagacagggtttcactatgttgcccaggctgctcttgaactccagggctcaagcaatcctcctgcctgggcctcccaaagtgctgggattacaggtgtgagccaccaagcccaactgaaattctattacacaataaaaagaaacttcaaaaacttcatgctaaattaaagcagccagacacaaaaggcaacacgtggtgtgattccattgatagacaatttccagaaagggcaaacctatggaatcagaaagcggatcactggttgcctgggactggggcaagggcagggatgaattgcagatgggctggaggagactttcggaggtgatggaaacattcaaaacccatgccggagtgatggttgcataactccatacacctggtttttttttaatcaatggtttacatacttttttttttttttttgagatggagtctcgctgtgtcgcccaggctacagtgcagtggcgcgatctcggctcactgccagctctgcctcctgggttcacgccattctcctgcctcagcctcctgagtagctgggactacaagtgcccgccaccacacccagctaattttttgtatttttagtagagatggggtttcacttgtgttagccaggatggtctggatctcctgacctcctgatccgcccaccttggcctcccaaagtgctgggattacaggaatgagccaccgcacctggccagtttacatactttcaatagatgtatgctatataaattatacttcaataaagctgtttaaaacattgtggtagacaacatatctattcagttcttctttctcaatctgattcatattcaaaacttcctagtcccccaaatccaaatatatcaagcatcaaagcatcctcatccagtgtggccacccacaaaacgtagattgttacaatgaggcaaagtcttgggccacctggtacctaagctcccatccttgccacaacatcacaccagggcctcgacatacctggacagaatgctctacatagttattcattttcctaaatttgatcaggaaaaagcagtgaaattcatatttctaaatttctcataaaaggcccctcctctcaaagaagcacactgtagaccccaacggtaaacctcatgcaaacacctaaggattaccattagccctagtaaacacctaaggcatactgagcacttattctcctaaactttacatggactaaaaaactatgagatacataattattgatattcccattttacagatgaaacaactgagactcagagaggtaaagttattttcccaagatcacacagctagtaagcagcagagcctgggtgtgaacccagctcctcaatggactcctgcgtcctggctcctaacaaataatccctgccatttcaccacaagaggagctccattcagccataagcaaagggcatgatgtcataaaatggtttccagcaatggaggtgaaatgccttgtttcctaactacaccatttcaaaagttttctcaacatcaggatgtggtaactttctcaagagagaaaagaactttgaagccaggagattcctccaaaaataagctgcacgtcttcgcaacattcgctgagtgaccccagaaataactgcattctgtcccctatgacatgtggcatcgtttttggtttttttaaccacaaatcttccaaccattccacagctttattgcctagaaccattaggtgaaatgggtggatccggttcaaaactgcctcctctcacaacctccaagaccacgaacacattaatatcagtgaatctttgtttccctgtcaataaaatgggagaatttttttttttgagatggagtcttgcttcttcacccaggctggagtgcagtggtacaatcctgactcaccgcaacctccacatcctgggttcaagcaattctcctgcctcagcctccccagtagctggaattacaggcaccaccaccacacccggctaatttttgtatttttagtagagacagggtttcaccatgttggccaggctggtctcgaactcctgacctcgagtgatccgcccaccttggcctcccaaagtgctgggattacaggcttgaaccaccacatctggcccctaaaatgggagaattaactccaaaaactcacatggttgttgtaaggattaaaacagccctatttatctcaagtgtccagcagacagcctgacccattacatattacttttttcttcctttaaccacccacccactttagccctcacgctgccatcccccagcccctagttctatttcaggaagctcctccatctctctgtgcttctcaagagtttctaaacttcaggattccaccttgatgttgctactcctgaaaatgcagattatatacaagagcatttacgcaaatgcacagcaaccctgatacacaatttgaatccaaatccatgtcactgtttaagaaatagattggccagacacagtggctcacatctgtaatcacagcactttgggaggccaaggtgggtggatcacctgaggtaaggagttcgagaccagcctgaccaacatggagaaaccccatctgtactaaaaatacaaaatttgccgggcatggtgcatgcctgtaatcccagctactcaggaggctgattcaaggagaatcgcttgaacctggaatgcggacgttgcagtgagccgagatcgtgccagccttggcaacaagagtgaagctacatctcaaaaaaaaaaaacagaattagattagttccaggccaagcacggtggctcacgtctgtaatcccagcactttcggaggccaaggcaggtggatcacctgaggtcaggagttcaagaccagcctggccaacatggtgaaacaactctctctactaaaaatacaaagattagccgggagtggtagtgggcacctgtaatcccagctacttgggaagctgaggcagaagaatcgcttgaacccaggaggcagaggttgcagtgggccaagaccaaggcattgcactccaggcaacaagagtgaaactacatcgtctcaaaaaaaaagaaagattagttccaaagctggtaaattctaaaggggctgtgatgctccattccaacgcaacctagaaaacttacttttaaataaaattatctgcaccactccctctggctctccatatgaacggctcatgtttctatcacgctaatgatcacttttgaacaatatttgcatttttctttcatgtactgactcaaaagttctcaactctgactgcatgttaaaatcatcaggggagcttattaaaatatatagatagaaacccaggtcccaccctaaattcttatttcaaaggtctagaatgaatcagaaaaggctagttaagtttccctggtgattgcaatgaacagccagggtcaggacacccacacctgttgggcaggtcttctttaattcatccttgcatccccatcagctggagtggctcctgcacatagtaggcgtctcataattgctcatggcacaaattaataaccactggattttagactccactgatcatattaattcatcacagtatttacggaggatgtacgatgtaccaggcactgttccaggcatagtgttcaagtcaattgtcatcattaaaacgaaggaggccgggcgcggtgactcacgcctgtaatcccagcactttggaaggccgaggtgggtggatcacgaggtcaggagttcaagacaagcctggccaagatggtgaaacccccgtctctactaaaaatacaaaaactagtcaggcgtggtgtcgggcgcctgtaatcccagctactcgggaggttgaggcagagaattgcttgaacccgggaggcggaggttgcagtgagccgagatctcgccacagcactccagcgtgggcaacagagggagactccgtctcaataataataataatactaataataataaacgcaaaacagagaagggaggagtgagggaactatctttgggtcagacaatccggagttcaatctccattttgcagtcttccctatagcccttaacctccgtaacctccagtttcctcctctgggtaatatcagtgaggcctcttcttcggaggattcaggaagccagggacaaagaccccacaaaatggccgccagcaccattctttttttttttttttttaattccactgacacctggtgaagccacccttatggttcactccacccgccgcgtctcctgttccgagcaactgacgctgcaataagcggccgccaccgggaaatgcccagagaggaccagacgcccgaggaagggcggagcagagcggccgcaggccccgcccaacaccgcgctcagcctcccgcgggctccagcctcacctgcgcggcctgtggagctgcacatctccaggccccgccccccagaactctgattggcgggtctaggcgggggccgggaaatctgcatttgcaccagcgcccacccccgtccttcccacccccgcccctcacgcccaggtaagtctatggcaggcgatacgagagccccgcaaacctcaacgcgtcacgctgccatcctccgaacaggaagacggcgaggcgcaaaataccaacccgtcccctcttcccaaatgcagaaaaacccttgcctgttccgcgcctaagctgccctcggggtctcctactgcgggaagggcacagcaggtggcagcccctgtcccagccgtgggattccttccccgaaattgtggggggagaacacaaggggtagtgtcaccaagcggccagtaggagaccctcccaccctcctgcgactgctggttcgggtccaccccgggcggagggggaaggggccaccggagcgcaggtggtctcggcgcagcctcctggggctgggacccaggggcgctgatggggtaccccgaggcgtaggccgcgcccccctaaaagctgagcatatctgggctcccgagtaatgctccaagcgcagagctcggtgtgacactgaccaaattgttacctcagatattaattacggacagatattaattacggaacaataaaacggtgagaaagcacggctgatccgaattccgcgagtgtgtaaacagcactggggcgggcccggcttctcggggtttctaaaggaaggtgggcaaggaggcccaggcaaccgggcgctcgaaccccaaagggccggcatcaggctaggtgccgcccggggctgaagcgcagggaccccctccccacctccccgcctccccagccctgccccaggctcatggcgccgggcgcggcgcgcggccaacctgtcaggcccggccaggctggcccgagcgccgggctccgggaggcgcggacaaaggaaaacacgggcccaggcccactcacccggcgcggggcctgctgtccatccgcttcttctggcgcaccggctgcagcgggatgttgtccgtcatgtcggcggcgccgcccgccttggccgccgcgccccccgcgccgcctgggccgccgcccggtccggcctccgcgccgccgcccgccggcgccgcgccgccccgggggaggaggcggcggcagcgggcgggccgggcccgcagcgagggggcgagctcgcgagcgccgggccacgcgcggagcgcccgcgcggcccgaccgacggacacgggcgcaccatgggcccgagctccgcgctgcgcccgctcgctccgcgccgcgccgcgcctgccacggggggcggccgggccgtgtccgcgccgccgcgaccgctgcagtgtccccgcccccggcccgcgcccgcgccccccacgcgcgcccacccggccacgcgccccccgcccacgcccgccgtgcgcgcaccctgccaccgcaccccccgcaaaatcccacattcacaatcacatcccagccctatacacgcgcgctgtgacactcatccccaccaatatctgacatgcacaatcacacgggcacccggccacgctcaccccatcagtcagtcattctcactcactcttgcaccaacgtgcatattcacgcccaggccctacacacacacctgccactgctcactgcctgcaacatctaacattcacaatcacatgtgagtcctgcacacacacataacactctcaccctcctgttggtcaccatcatccatgcacccagtttctcaagcctcacacccatgtgcctgcagaaatcacagtcacacagggaccctcagcttatcagactccttcaccctctgaccttcaccatcctcaccctcattctctatctggattctgggaactcaccatgacacacacgcacctgcctctttcatccaaacacccttcaatagtctgaacaccctcattctcacaccagccactttcttgggcttgcacatgggccccactctcaggcctcagacagtcaccctgcattacctgtcactgtgattcacggtctcacacacacacctatctccaccgcagcccacatccacactcacttccacaccctcccacacagtgtctgggacccatgaacttttcaaaggcctgataaagttatgagagcaggaaaaaaaaaacagagggaaggaacaaagtgagggagtttaaaaatcaatatgtaactaaagagcctgaaattgtaataataccatataaactaatctaaagctgacttttacatagttacatctaatgactgatcatgttggacgccgtttcttttttttctttttgaaacagaatctccctctgtcgcccaggctggagtgcagtggcaaaatctcagctcactgcaatctctgcctcccaggttgaagcaattctcctgcctcagctacccgggtagctggggttatacatgtgcctggctaatttttgtagttttagtagagatggggtttcaccatgttggccagactggtcttgaactcctggcctcatgtgatctgtccacctcggcctcccaaagtgctgggctcttccttggcatttgctaaatgccatagagatttaattgggatgaaggaagagcatccggcccagtccacctttccaactctcaccagaagcctttccctgctcccacgggccactgcgcttggcccttttattttgttttatttgtttgtttttttaagttagtgctaactgccagcaagtggatgccttttgtgtttgctgtcacacaggatggagccaccaaatatcccagtgtctgaggtggatctcaaaccaagaagtgtgacttatctcatgcaccagagaagttcctcaagaaaagaagcatgtcattagtaattgctgcattgcacatttggagaggaaatagcattctccagccaacaggcctggtgtgctttgcttcctgctgtctcttctacatctaaaatgatgcttcgtacatagcatggcacaagttggcactcaataaaggcttcttgcatggaagaaggataaacaccctgacacaccaattatggcatcagtgtgggtcccaccatctcccatctgctttgctagacatccccctttcaaactccacaccctcttctcaaccccactactacacagggtacaagagaagaccaaggaggccgggcgcggtggctcacacctctaatcctgacactttgggaggccgaggtgggcggatcacttgaggtcaggcattcgagatcagcctggccaacatggtgaaaccccatctctactaaaaaacaaaaatacaaaaatatattaaaatcacccgggcacggccgggcgcagtggctcacgcctgtaatcccagcactttgggaggccaatgcgggcagatcacgggtcaggagttcgagaccagcctggccaacatagtgaaatcctgtctctactaaaaatacaaaaacttagccacgcatggtggcaggcactggtaatctcagctactcaggaggttaaggcaggagaattgcttgaacccgggaggcggaggttgcagtgagccgagatcatgccattgcactctagcccaggcaacagtgcgagactctgtttcaaaaaaaaaaaaaaaagaaagaaaaggttagctattaaaagtcctacttctatgatatgaatattcatagttttccctaattcaagaatgaacacaacagcattatcaatgctcatccctgaaagattccaggtgggtttttaaaatacaatttaattagcaggattttttgttttagtagttttccatttatagaaaacataagcaattagcacagagagtttcatatgtccccatcctatatccatgtccccagtcatggggacagtttcccttattaacattttgcggtacatccaggtggatcttaaatatttcattgcttttgttttgtcaatactctctactttttctctagcaaaacgtgttgcttttgcaataattttttctttaaataagtttttaaaagatgaaagagcccactattaaccctcaaaggtactaacactctcatatggaaagagagggggaaattgtaggtggttttttgttttgttttgttttgtttttgcctttttactttccaaattttctttctttatttatttatttttatttttgagatggagtctcactctgtcgcccaggctggagtgcagtggcacaatctcagctcactgcaggctccgcctcccgggttcacgccattttcctgcctcagcctccccagtagctgggactacaggcgcccatcaccatgcccagctaatttttgtatttttagcaaagacagggtttcaccatgttagccaggatggtctcgatctcctgacctcctgatccacctgcctcggcctcccaaagtgctgggattacaggcgtgagccactgcaaccggcctttactttccaaattttctttagtacgctttcataatcagaggagaaaatacatttaaaaaaactcctttttgtttttattcttattattttttgagacagagtctcactctgctgcccaggctggattgcagtggcatgatctcagctcactgcaacctccgcctcccaggttcaagcgattctcccgcctcagcctcctgagtagctggggctacaggcacacaccaacatgaccggctaatttttatatttttagtagagaagaggtttcaccatgttagccaggctggtctcaaactcctgacctcaggtgatccacctgcctcgcctccctaagtactgggattacaggcatgagccactgcgcatggccgtttttattttaagagacagagtcttgctctattgtagctgggactacaggtgtgcactgcatgccaggctaatttattttattttttatagagacaaggtctcactatgttgcccaggctggccttgacctcctgggctcaagccatcctcctgccttgacctcctagtgtcctgggattacaggtgtgagccactgcaccaggccgaaactccttttcagcaaggtaatccctcaggaagggacgcacctgcaggcttaaatctcatcttgagagagaatcagatgcctgcttgggacaagcgagacacccaagggatcaccagagcggtgccagggtctaggagaggggcaaggctgggggaagtgatgagatgtgagaggttaatctgaggcccccttctgggtatacagcaacccctcttcctgacacagcactaccttctgcccaggaatagtcacctcatggttctgcttcctcaggaaaagccccttgacaatcctctccatccaataggtcctgggtacagtgcacccctgactcctaggtatgtggagtggaaaggtcctggagggataagccaatctagtccaacttctactttccagaaatcagagagactgtggcccaaagaggtcatgtcacatgcctctatgtcacatgccatccatgcccgatggatgacaggctggagccggaatataccttgaaactctcatcttggcccaccatgaagccttatgttcatagacctccaagcccactcctgctttattatttatttgtttgtttgtttgtttgtttggagatggagtctcactctgttgcccaggctgaagtgcagtggcatgatctcagctcactacaacctccaactcccaggttcaagcaattctcccacctcagcctcccaagtagctgggattacaggcgcgcgccactatacccggctaatttttgtatttttagttgagacgggttttcgccatgttggccaggctgatctcgagctcctggcttcaggtaatccacccgcctcagcctcccagagtgctgggattatgggtgtgagccactgcgccctgccccactgctactttggacctgctgtaaagaaggagtgtttggtggtaagtgggcaagaagtcaagggtacgggcagtgatgagagatggaggaggcagggaaaatgggaataaataataaatatgctttgggtaaactcaggctgggagtgagaaaataaaatccttttagtgcctacaattctctctccatgaattctctctgaataaacattctaggtatcccccaaagcagtttccctaccttggcactattgacatttgggctgaatatttatcatggggggctgtgctatgcattacaggaaatttagcagcattcttggtctctacccactaaatgccagtagctgcctcacaccagctgtgacaaccacaaatgttttcacacatcatgaaatgtctcctggggagacaaaattgtccctagttaagagccactgggctagaatgtgatgttaaatcattttaaaatctctaataagactgtgtgtgtcatttttttttttttttttttttgagacagagtctccttctgtcacctgggctggagtgcagtggcaccatctcccgggttcaagcgattctcctgtctcagccccccgagtagctgggataacaggtgtgtgcctccaagcccggcaaatttttgtatttttagtagagagggggtttcaccatgttggccaggctgctcttgaacttctggcctcaagtgatcctcccgccttggcctcccaaagtgctgagattacaagcctggcgtgagccactgtgcccaaccaactgtgtctctctctaacacttaccaatccagtcctttcccaaccctttgttttttgttttttttggaaagaaaaagaacgtcttaggttgagaactttccatgaacaacaatatctagctaaaatttaataatattctgggctgtgtgtgtattttttagatagagttggccaggcacagtggctcacgcctataatcccagcactttgggaggccgaggcaggtggatcacgaggtcaggagatcgagaccatcctggctaacacagtgaaaccccgtctctactaaaaatacaaaaaatcagctgggcgtggtggtgggtgcctgtagtcccagctactcgggaggctgcgacgggagaatggcatgaacctgggaggcggagcttgcagtgagccgagatcacgccactgcactacagcctgggcaacagagcgagactccatctgagatagtcttgctctgtcccgcccaggctagagtgcagtagcgcgatcatggctcactgcaaccttggccgcccatgctcaaactatcctcccacctcagtcccccaagaagctggaactacaggcattcatcaccatgcccagctaatttctgaaatttttttgtagagacggttttgccatgttgcccaggctggtctcaaactcctgagctctaatgagcctcctgtgttagcctcccaaagtgctaggattagaggcgtgagcaattacatccaaaaatattctgttttcacctccaaaaagggcactaagaaggttgggggaaaaaaatcaacagatgtccaatcattccgtcaagcagtcttcactaaacacctacaatggtctatgcatagagggtacagtcagacacagcccctgtttcaaggagatgacatcctagtaaaggttgttaaaaacttagaaagcatcggccaggcgcagtggctcacacctgtaatcctggcactttgggaggccaaggcgggggggggtggggcagatcacctgaggtcgggagttcaagaccagcctgaccaacatgaagaaaccccatctctactaaaaatacaaaattagccgagtgtggaggcgcatgcctataatcccagctactggggaggctgaggcaggagaactgcttgaacccaggaggcggaggttgcggtgagccaagattgcaccactgcactccagcctgggcaacaagagcaaaactctgtctcaaaaaaaaaaaaaaaaaattgaaagcatcaaaaagatgacttgatagcttgccttagcatacccttccaggttccctgtgtctttcatcgtccttgagctattttacaactctataaattgtagaaaactgataattatgcaaatgattcttgtccatagaaatgcaaattattttgtccagtggaatgcagttattgcctgtggatattgatcatgttttgcatctgtttgtaagttcttttcaacattcctaattgccagcaatttaggagctcattttaaattctcctctgaatcaactgtaaatttattaataattctttgacatgtgttcattttatacaggcatacctgagagatattgtgggtttggctccagatgaaaaaagaaaacaacttttatctcaggaatgtgagtgtttttaaattatcaggcccagagagacattaaaatgaagcagcaatcacgttctactccctcctttgagctatgtattcatctcctgaaactgcccgttattgccacaagtagctagaaattaacctaataatgctgcaccagacactataacccacaccccataggttagcaatgtatagtcaattactaatcaatgttatttctgtaaaccaatgagaatttctgatgaacaagtttgtatcagcccactccctgtccgcttttttaccctttaaatacctgcttatggcctggtccagtggcttgcgcatgtaatcccagcactttaggaggccgaggaagtaggactccttcacccgtctgtacaaaaaaataaaagaattagctgggtcacggtggcacacgcctgtaatgccagctacttaggaagctgaggtgggaggattgcttgagccaaggaggctgaggctgtagtgagccatgattgtgccactgcactccaggctgggtgacagagcgaaaccttgtcaaataaatacataaatgggccagactcagtggctcatgcctgtaatcccagcgctttgggaggccaagatgacaggatcacttgagcctgggagttcaagacctgcttgggcaatatagtgagaccttgtctctacaaaaaatacaaaaattagctgggcatggtggtacacgcctgtagtctcagctactcaggaggctgagttgggcagattgcatgagcctaggaggttgaggttgcagcgagccatgttcacatcactgcacgccagcctgggtgacagggtcttgctctgtcacccagtctagagggcagtgattaatcaatcaaccaacctacctgttggtaacaaaagccatacagaggtcatatccaaggttacttggggctgagtcttccaagcagctgtcctcactttggctcaagtaaactctaaattgtattttgtgcctcagcctcttccttttagatcaacacagaccacaacaataaagcaaatattgcaataaagcaagtcatatgactttggtttcccagtgtatataaaagctacgtttacactatatcctgttaagtgtgtaatagcattacatctaaaaaacaatgtacaggccggccacggtggctcacgcctataatcccagcactttgggaggctgaggcaggcgaatcatgaggtcaggacttcgagaccagcctggccatcatggtgaaaccccatctctactaaaaatacaaaaaattagctgggcatagtggcaggcacctgtaatcccagctattcgggaggctgaggcaggagaattgcttgaacctgggaggcagaggttgcagtgagccaagatcgcaccagtgtactccagcctgggagacagagtgagactccatctcgggaaaaacaaaaaacaaaccaaaaaaaaaaacaacgtacataccttaattataaattcctttattgttaaagatgttaatgatcctctgagccttctggagtcgtaatttttttgccggtgaaggatcttaccttgatgttgatggctgttcactgatcagggtggtggttgctgaaggttgggatggctatgccaatttctttaaaataagacaacaatgatgttggctatattgattctttatctgagatttctttgtaacttgtgatactgtctgaaaatattttacccacaacaggccgggcgcggtggctcatgcctgtaatcccagcactttgggaggccgaggcgggtggatcacaaggtcaggagatcgagaccatcctggctaacacggtgaaatcccatctctactaaaaatacaaaaaaaattacttgggcgtggtggcagacgcctgtagtcccagctacttgggaagctgaggcagaagaaccacttgaacatgggaggcagaggttgcagtgagctgagattgcgccactgcactccagcctgggtgacagagcgagactctgtctcaatctcaaaaaatactttctttgctcatctgtaagaagcagttctttattcattcaagttttctcctaagattgccaccattcagtcacatcttcaagcttcactgctatttccagctctcttgctatctccatcatatctgcagttacttcctccactgaattttgttgtttgtaaagacaggatttcactgtgttgactgggttggtcttgaactcctggctctcaagccatcctcctcggcctcccaaagtgctgggattacaggcataagccacggtgcctggctctttcactgaagtcttgaacccatcaaagtcatccatgagggttggaagccacttcttccaaactcctgtttatgttgatattttgaccttctcccatgaattacgaatgtttttaacaacatctagaatggtgaatcctttccaggttttcactttactttgcccagacccatcagagaaataacaaactatggcagcttacaaaatgtagtatttctgaaataataagacctggaagttgaaactcttagaggcatttgaaccagagccactccatctcgaacaggagctggggaaaataaagctgagacctactgggctgcattcccaggaggttaaggcattcttagtcacaggatgagataggaggtcagcacaagatacaggtcataaagaccttgctgataaaacaagttgcagtaaagaagccagctaaaacccaccaaaaccaagatggcgacaagagtgacctctggttgtcctcactgctacactcccaccagcgccatgacagtttacaaatgccatggcaacatcaggaagttaccctgtatggtctaaaaagggaaggcatgaacaatccaccccttgtttagcatatcatcaagaaataaccataaaaatgggcaaccagcaactctcagggctgctctgtctatggactaaccattctttcattcctctgctttcctaataaacttgctttcactttatggactcatcctgaattctttcttacgtgagatccaagaatcctctcttagggtctggatccagactccttaccagtaacaaaaccactccttgatccagactacaaaatgaatgttgtgttaacaggcatgaaaaacagtattaatctcagtattaatctccttgtacatttccatcagagctcttgacagatgcattagatgcattgtttttttgttttttgagacgggagtcttcctctgtcgcccaggctggagtgcagtggcgtgatctcggctcactgcaacctccgcctcccaggttcaagcaattctcctgcctcagcctcttgagtagctaggattacaggcgcccatgaccacgcccagctaatttttgtgtttttagtagagacagggtttcaccatgttggtcaggctggtctcgaacccctgaccttgtgatccacccgcctcggcctcccaaagtgctgggattacagatgtgagccactgcgcccggcctagatgcattgttaatgagcagccataatttttgaaagaaatctttttttttttttttctgtgcagtaggtctcaacagtgggcttaaaatattcagtaaatcatgtgataaacagatatgctaaactgggcgcggtggctcacacttgtaatcccaaaactttggaaggccgaggcgggtggatcacttgaggtcaggagtttgagaccagcctgaccaatatggtgaaaccccatctctaccaaaaatacaaaaggcagcaggtgcctgtaatcccagctactcaggaggctgaggtaagagaatcacttgaacccaggagacagaggttgcagtgaactgagattgtgccactgcactccagcctgagtgacacagagactccatctcaaaacaaaaatgagatatgccatcatccaggctttgtcattccatttccagagcacatgcagagtagaaatagcatcattcttaaaggccctaagattttcagaatggtaaatgagcattgctttagcttaatgtcaccacctgcattagcccctaacaggagtcaccttgtcctttgaagcaaggtgtttttttcctttctagctatgaaagtcctagatggcatcttcttccaatagaagactgtcttgtctactttgaaaatatgttgtttagtgtagctactgtagttattgtagctagatcttctggataacttgctgtagcttctacatcagcatttactgccttaccttgcttttttttttttgttttctttgagacagagtttcactctttttgcccaggctggagtgcgatggcacaatcttggttcaccacaacctccacctcccatgttcaagtgattctcctgcctcagcctcccgagtagctgggattacaggcatgcacctccaagcccagctacttttgtatttttagtagaaatggatttttctccatgattgtcaggctggtctcgaattcccaacctcaggtgttctgcccccctcagcctcccaaagtgtgaggattacaggtgtgagccaccacgcccagctgcatttttatattaggaagatgtcttcttgggcctggtgcagtggctcatgcctgtaatctcagcactttgggaggctgaggcgggtggatcatctgaggttggaagttcgagaccatcctgaccaacatggtgaaactccgtctctactaaaaatacaaaaattaactgggtgtggtggtgcgcacctgtaatcccagctactcgggaggctgaggcaggagaatcacttcaatgcgggaggcagacgttaaaaaattaagcagtacttaattttttttttttgagacagagtcttgctctgtcgcctaggctggagtgcagtggcgtgatctcggttcactgcaatctctgcctcccaggttcaagtgattctcctgtctcagtctcctcagtagctgggattacaggcgcaatgccaccatggccagctacttttttgcattttagtagggacagggtttcactgtgttgcccaggctggtctcgaactcctgagctcaggtaatttgtccactttggtctcccaaagagctaggattacaggcgtgagccactgcgcctggcctataaacaaatttaaacagagaaaaggtacagtaaaaattagtattacaatcttatgggaccatggttgtatatgcggtctctaactgacaaaacaaagttatggccacactatgcgggcataatctacttgcataggtacaatcacaatctaccctttagaactgacttcaaagattaaggctgagaggaatgatgcacacatatacacactacacactgtattatggaaaacagcacacacacacaaagacaatgataatcttttccccagctatcccaagcaggaatttaccctggaagtgaactcaagtataagaaaagaaataccacaaaggcaatcaaaaacaaaataaaaaagttcacggggccaggcacagtggctcatgcctgtaatcccagcactctaggaggccaaggccagtggatcattcgaggccaacctggggaacatgatgagaccatctctgcaaaaaaaaaattagctaagaatgatggtgtgtgcctgctactccacaggctgaggtggaaggatcacttgagtccaggagctcaaggccagtcagctgtgatcatgccactacactgcagcctgagtgatagggacgtttatgggtaaacaccagcagtgttgtcaatagatgactagacatcattgttacgtaattgcagttattttaaaaggattagctggaattgggttttaccttggaaagatgtctgaaatatgtgagaggggagaaaaaaggctgggcaaggtggctcacgcctgtaatcccagcactttgggaggccgaggcagatggatcatttgaagtcaggagttcaagaccagcctggccaacatgctgaaacctcatctctactcaaaatacaaaaattagccaggtgtggtggtgggcacctgtaatcccaagtaaggaggctgaggcaggagaatcgcttgaacctgggaggcggaggatacagtaagccaagatcgagccactgcactcccttgagcctgggaggtcaaggctgcagtaagctgagatcataccattgcactccagcctggatgaaagagtgagaccctgtcttaaaaaaaagaaaaaaggccgggtacggtggctcactcctgtaatcccagaactttgggagaccgaggtgggcgggtcacctgaggtcgggagtttgagaccagcctgaccaacatagtgaaaccccatctctgttaaaaatacaaaattagccgagtgtggtggcgcatgcctgtaatcccagctactccggaggccgaggcaggagaattgcttgaacctgggaggcgaaggttatagtgagccgagaccatgccattgctctccagcctaggaaacaagagggaaactgtcaaaaaaaaaaaaaaagtgaggcaagtatggacatagccaggtgtgcatctttttgacgctaggaacaagagtgtcacaaggcagctgaaagtgattgtcaagtaaagattctcaggtatagagcagaaagtaccagaaaaatttatatacacctgggtgagaaaaaaaaacattcaaattttattttccaacagacagacagcatcagcaggtacaactacaggggtttctccgtagatcatacattcacaaggcattattagctcaacagtgagaaagccactggtgtgttttctgtaacaatatccacttcacagtgtaaacaggtactattatcgtgttcacttacaattccagaaggaaaggcacaacttggcaaaaaaaaaaaaaaaaaaaaaaaaggggggcggaatcctaaagtcaggtgcaacgatgaagagacaacactttggctaatcgtcttggatgcatatttccgtcaggaccttccacatagaggggaaagacttttctcccagaaattagagtttttttctttctttcttgttaaaccaagagcaatgtttcgtttgctcaatatcacatttacaaaggaaactacaaaaaaaaaaggcatcacaaaatcatcttgaacgttcacctcttcccaccaatacatcaactcttaggctttagacagggcctgggaatacttcagcggtcttaaaataggaaaatagacactatggctacaaaaaataaaaaataaatgaggtagataaattaaagctttcacacccaggacgtgcctgttctaacttcgtagccttcatgaaatattcagcaaggaaacaaaacaaaacaaaaaatcgtcataattacttggcataagtcgcaccaaggaaattcaacaaaagcaatcagtatgtgaacctgtgatgggaaacacgcccttccacgagtttcttctcgagcatgaaaacccagttcttcaatagagtaggcactggcaaactaagtcacctgagattccccgctcaggtgcccacctcttctgggatttgggaagaggaaggcatccaagaggtgtggggaaaacattggcactctcggggctccaactgaactgtatttaaataagcagcaacacacacattgactccctaaggactaacgtaagtccatttgagggcctcctacttaaggttctaaggttgaagcagttttataattctacaaccctagttttttgttgttccttttttaagtacattcaaaaaaaaacaataagatggggacagggttggggcatataaaacaggtccctaaagagatgacagaccttgtccttttacccgtgtccagttaccagtaagtatacagtacccatctcccctcaatgaggctgtgtagttgtcttttccactgttgttcagtaagttccaacgattctaccttgaaataggtaacagtctttggaaaaagtcactctaggttgtacaaaggttctatgtatacgtctgttacaagtaacaaagctactttgcaagacccgcttctttccaaaattagaaaaaaaaaaaaaaagtgccaggcgtggtagctcatgcctgtaatcccagcactttgggaggccaaggcgggtggatcacgaggtcagcagttcgagaccagcctgaccaacatggtgaaacccagtctctactcaaaatacaaaattagccgggcgtggtggcacctgcctgtaatcccagctactctggaggctaaggcaggagaatcacttgaacccagaatggggaggttgcagtgagccgagatcatgccactgcactccagcctgggtgatagagcgagactccatctcaaaaaaaaagagtctgtatttgttttggtatgcattttttttttattttttcaactttttgcaaagcagcatagcaacaatcgtgattgtagcacttgcctgaggttgtggtcacaaccaacgtagtaaacatcatttgcatatcagtaagaaaaagaaaacaggaggagatgagttcttacaaaacaaagcagattctagagatttcactgtgtctgcattgctccttccacgcaagttctcccttagctgaccgcaatcttgttttcttccaggaagtgaggaaactggtgtttgggaacgccgtcagtagcacttggtttttccacatctgcactgatacccgactgggagccatccatcttggagacagtggcgttattcacaacggaggtggcccccaaggaaaccgggagggtaggaacccccccactctggatcacagagatctcattggtcttcacggccagaccgccattgagcatgctggtgtactggttccacacaacagggtccacattcactgaaggggccaggatttccttgggaaagatttctgagactctttttccgtccgtacctaacagagccatggtgttctcgatggccaacttccttccacggcgggctgagttattgttcgccccgtgtgtcatgtagtgaacctatgggaacaggacagaaaggtttttaccaaaatagagatttgaagctcactggcaagccaagaatcaatctgcatatggatttcattctacccagtgttttaacatatagatgatccttgacttacagcggggttatgcccagataaactgattgaaagtagaaaatattcttagtctaaaatgcatttaatacccctaactagccaaacatcatagctcagtttagcctacctcaaacacactcagaacatttgcattagcttacagttaggcaaaatcatctaacgcaaagcctattttattttatacatgagcactgaaacagctcatgtaggccaggcacggtggctcacgcctgtaatcccagcactttgggaagctgaggtgggcagatcacttgaggtcaggagttcaagaccagcccggccaacatgatgaaaccctgtctactaaaaatacaaaaagtagccaggcatggtggcacatgcctgtaatcccagctgctcgcgaggctgaggcacgagaatcgcttgaacctgggaggcggaggttgcagtgagccaagatcatgccactgcactccagcctgggtgacaaagcaagactccatctcaaaaaaaaataaaaaataaaaaattagctcatagctcatgtgattgagcatgtactgaaagtgagaaacagaatggttgtatgggtgctcaaagtctgatctctactgaatgcctatcacttttgtatcatcgtaaatcaaaccatcttaagtcagggactgtctgcactttatatttagaaaatcagatttcttatatcacctaacaaacattcctccccagagcaaccaagatggggcttatagtctccaactgtctctgctccaccaatcatgggtgtacctatgtgaaaacctactatatcctgggcattgatccaagtgccagggttaacatttttttttgagtccttttttttttgagacggagtctcgctctgtcgcccaggctggagtgcagtggcgcaatctcggctcgctgcaacctccgcctcccgggttcaagcgattctcctgcctcagcctcctgaatagctgggactacaggcacgcgccaccatgcccggctaatttttgtatttttagtagagacggggtttcaccatgttggccaggatggtcttgatctcgtgacctcgtggtccgcctgcctcggcctcccaaagtgctggaattacaggcgtgagccaccacgtccggccttttttttgagtcttaatctgtcacccaggctacagtgcagtggcacagctcactgcagcctcaacctccaaggctcaagcaacccacccacctcagcttcctgagtacctgggactacaggtgcacaccaccatgcccagctaattgtttttttttttttttgagacagagtctcgctctgtcgcccaggctggagtacggtggaatgatcttggctcaatgcaagctccacctcccgggttcacaccattctcctgcctcagcctcccgagtagctgggactacaggcgcccaccgccaccacgcccggctaattttttctattttgtttttagtagagacagggtttcatcgtgttagccaggatggtcaggatctcctgaccttgtgatccgcccacctcggcctcccaaagtgctgggattacaggcgtgagccactgcacctggccggctaatttatttttatttgtagagactggatctccttatgttgctcaagctggtctcgaactcctggcctcaagcaatcctcccaccttgtcctcccaaagtgctgggattacaggcatgagccactgcacccagcctagagttaacatttttaaaatgcacaaacctacgcaggtaataaaactgtagagtgcacaacatgcacacctgagtacaagtaaaatgggaaaatctgaatgttgattgtaacaatgtcaatatcttgattatgctacaatgttgatactaccgttttgcaaagtgctaccaatggggaaaactgggcaaagcatacaaggatgtctctgtattacttttcaaaagtccagtgaaaatctatacttatttaagtaaaaatttcagttaaaaacaatttgtgggcagggcacagtggctcacgcctataatcccattactttgggaggctgaggcaggcagatcacctgaggtcaggagtttgagacgagcctggccaacatggtgaaaccccatctctactaaaaatacaaacagtagccgggtatggtggcacacgcctgaagtcccagctactcaggaggctgaggcaggagaatcgcttgaacccaggaggcggaggttgcagtgagtcaagatggcaccactgcactccagcctgggcaacaagagcaaaactgtctcagaaacaaacaaacaaacaaaacaaaccaaaacaaaacaaattttggggcaggacgcagtggctcacacctacaatccaggactttgggaggtcagagcaggtggatcacctgaggtctggagttcgagatcagcgtggccaacatcgtgaaacctcgactctactaaaaatatacaaaaattagccgggcatgatggcgggcgcctgtaattccagccactcaagaggctgaggcaggagaattgcttgaacccgggaggcagaggttgcaatgagccgagattgcaccgttgcactccagcctgggtgacagagcaaaacgaccattccctgatgcagctgacatctaaatatagagaacatcaatgtctctaataattgctacagagaaaaatgtatctggctgggaaagctacagaaggccatggtgggaataggatgctatttaatctaaggtggtaggcaaggcttctgctgaagaagggaccttactagcacctggctgctttctttaattatttttcctgtctggctttcaagttttgaaatccttttcagcttcttttttttttatttatatgaatttaatttttgtagagatggcatcttgctatgttgcccaggctggtcttcaactcctggggtcaagtgatcctcgcaccaccacctcccaaagtgctgagagtacaggcatgagccactgcgtccggcccttttcagcttcttaagagtttaaaactcttaagagacagggtcttactctcttgcccaggctggagtgcagtggtgtgatcacagctcacagaagcctcgacctcccaggttcaagtgatcctcccacttcagcctcccaagtagctgggcctacaggcgcatgccaccacgcccatctaatttttatttttattttgtagtgacagggtctccttatgttacccaggctggtctcaaactcctgggctcaagcaatccacctgccttggcctctcaaagtactcagattatgggtgctgagccactgcacccaggtagtatttctaatttttaaaattaaaatgtaaacattttaatttttttaagagacaaggtctcactttgttttctaagctggagtgcagtggcatgatcacagatcactgcagccttgatctctcaggctcaagtggtcctcccacttcagcttcccaattggcggggacccaagcatgcaacaccatgcccaactaatttgtgtgtgtgtgtgtgtgtgtgtgtgtgtgtgtgtaaagacgttgtctccctatgttgccaggctggtctcaaactcctggactcagctgggtgcagtggctcatgcctgtaatcccagcactttgggaggccgaggcaggcggatcacgagatcaggagatcgagaccatcctggctaacgcggtgaaaccccacctctactaaaaatacaaaaaaattagccggccatggtggcggacgcctgtagtcccagctactcaggaggctgaggcaggagaatggcatgaacccgggaggaggagcttgcagtgagcttgagcttgagatggcgccactgcactccagtctgggcgacagagtgagactccgtctcaaaaataaataaataaataaacaaactcctggactcaagcaatcctcccacctcggcctcccaaaggaggaatggaaggatggaagaactcatcacggcttgtgccaataagaagacacctggtgcctagcccccatcctgctgaaagcccacacaaacccacctttaagttgcctttggtggtaaaagctcgcccacaaatgttgcacacaaaaggcttctctccagtgtgagtccgctcgtggatctgaagagcgctagcagacgagaagttcttcccacaccgtgtgcagccatgttgcttggcctgtcggcgtggctgggctgctaacaaaggggtcatccctggggacaatgtcgagggtcccacaaatgtgccaggaacttcaaccttgacataggtcggcggggctcggataaacgtggaagggagactgctccgacctagtacacagaggggaaaaaagccagacctttatcatccaaccttcattctttctcttcaaagcaaaagagatctttaaaaataactgcctgctagtttgagagtctggagctggctttgtaagtaattaacaccttcccctttgaattgtttatctgcacaaagaataaagcttcaaatgcttgggaaaaggtatcactttgggttttttttttttaaaggcatgggcaacatataaacacatatgtaatttaagttcaaatttctgcataagaaactacctttaaagcatatgcccagacaccatctttctttgattctttgatacagcttttcccttattttaccattaatgacatcaacaaacctctcaatagatatgtgcatttaaaatgggttcatctttccctgcttcaagagtggctaatttgtgaacattacatcaggcagtggggcctcagagtcagggaaccacggcttatttcagtggtcaaaaagcagtggccacttcctcaaacatactcttaagacacccatatacagaatcatagtgtggagaaacaaaaagaaaaaaactataacaaaatagaacgactacccacccctatgtcccaaggggctcaaagacaaaaataaaaaccaacaaaaaaggtatgctgtccatacccattttgcattaaccatcataaattaaaagcatgttcgttactaggatagaggcagttactattgccctctacccagaagtaaagaaaagctaattgccctatagaaggggctgcttcaagtcatactctccgtttgtaaagttcaacccaggctcctttttgatgaccttgagcccaaaatggacataagttaaatccaaagctctatcaccttccatctcagtgcggctgttctcggagctctctgctttgctcccagcatcgggagactttgacttgatgctttcggcttgactattggccggggagagtgcctggaaggatgtggtttccaggatatctgggcttcggctctgatactcctggtctcccatcagcgaggatgagtcgttggtcaagccatcgctctccacggaaccgttttctctgctgccctggcgctgcaggttaaaaggggcaggacccactttccctggggcatctaaggaagccatcatggcaaaccctagcgtgggtgatgccgagtggatgctgggaagaggcgtggggaccttggaggagctgctgggagcctcctgggagctgacttcctctacatcgatgctttcgatgacatcatcatggcagatagcgccggtgctgccgttctcacccacggtcattggctcagaacccgtaaagtcacagggattctctggcaggggcgtgttgggaatctgaccgcccatgtgcatccgaatatgttgctgcagcatcacggcattagtgaacttcttctggcagatggggcacgaatgctgcgtcttaatggatgtgttggttcggtgaaccccaaggtgtgtcttcaggttacctttggtagaaaaggctcggccacagatcttacactggaacggtctctccccggtgtgggtgcgataatgcatcttgagggagctctgacagcttaagactcggtggcaaatgagacattcgttgggatcagtggtggccttgtcaatgttctccaccaactgctgcaatttcagggtctctgaccctggctcaggggtcccactcccttggaagccaccagcccttggggaattatagtttggtcccaccccagggagtgtgggtccaccctcactttctggagaaggcccaggctgcaggtcaccgggcaaggagccacccgtgaggtccttgggattagtccccgaagaaagattctgaggtagccctacagaggtggttacaaggacaggtttgctgtctaaagaaagactcggttcatctatggggtcaggtacagagagtgcataggggatgccattgccggccgccactttgtcctggaactcggcaaacagctgggggtttgccttcacctggggatgtcggtgaaagtgcaccttgaggttgcccttggtggtgaagcgatgaccacagacagagcacacgaagggtctctctccagtgtgggagcggaggtggatctgcaaggagctatcagtcccaaaaaccttgctacagtacttacacttgtgcttgtagagggccgcctcgtctttgggtttgacatccaccgcggagatgttcggtggcttccccttccctttcttggatgtgtctagcgccacagtggagaaagggctctggaagagcaccgagcccggggcctgaggaagcaaagcgctcgggaggcgggacatgacgttcgggagcacccgggtcccatccggcttcagagtgaagggtgccagccctggggacagggagctggtggcagaagggatgttggcgtgaggtagcttggcttgtttcaaggcatccagagacagaccttggcttccagctttctggctgagcaaagccacagctgcagaaacctgctgagacatgtggctgcccaaggtcttcagagtgtcggcccctgccccgcttgagtggagggcgtgggaggcccacatgttcacctggatgcggatctgctcggtgagctggatctgctgtagctgctgctgctgcagacacaagatctgctcgaggacccacgggatgctgttggcaccaggcacgggggcagggagtgcatccgcgctccgctgattcaccgccaccttggtgccccgtagtgcctgcaaggtcacattagtgttggccactttgcctttggctaaatagcttatgtcctggggggtgggtggcagggctgtctctgtctttaggtacaccacagactccgcatccggcttctccttcatgtcctctgagctgccgccattctccctgtgacagtccttactgccgggactggtgggctggtggctcagtacagctccggagaagtcttctgaaggcacaggcccctcgctgtcattcatgatgaggacaggtggatttttagtgcaatttttcttatgttccaggaactcagagatgctgaagaactccgcacagcatttctcacagacgtgcgtctcctcccgacgaagccgctttactgtggcttcatcctcactcgccacctcgtcattccctgggtggttcactggagcacctgtaacaagacagaaaaagctaaggactctgcccaagtaaaagatgtggggggagccgggcaccgtcgctcacatctataatcctagcactttgggaggctgaggtgggcagatcacctgaggttgggaattcaagaccagtctggccaacatggtgagaccctgtcactactaaaaacacaaaaattagctgggcatggtggtgggctcctgtggtcccagctactcgggaggctgaggctcaagaattgcttgaacccaggaggcagaggttgcagtgagctgagatcccgccattgcactccagcctgagcgacagagcgagactccatctcaaaaaaaaaaaaaaaaaaaaaggcaaaaaggctgatccctgaatttcttttgtaactggggcttacttactttagggttagtgccagcctacacattgcaactccgaacttgggactgtgttttagccagatgctggggtccttcacatgatgcctggaagtctctcgaagctacttcattgttctcacctccctgctgtcctctcaggtataccccatcatcaagatatcaatggagcttggggccacaggacaaagacaggcatatctcagacccagcagctaagcctataaatctaaaccacacaagacattcacacgagcatacaatgatctaggttttcttgttttttcagaaatgttcacagcagcaaagaagtaaattttggcccacccacccatagtgtgagaaatatgcagaatttctgtatgccacagaaattaagtgaaagaaacgggttgcgcaacaatatgtacaacatgaccattttgcttaaaacaaaacctgtgtttgaaatgtacaaatgtggctgggtgcagtggctcgcaccagtcatcccagcactttgaggccacttttgagaggccgggagtttgaaaccagcaacacagtgacaccccgtctctataaaaaaaataagaagataaaaatagctgagcatggcagcgtccatgtatagttcaagcaactccagaggctgaggcaggagaaccgcttgagcctgggaagtcaagccactccagcctgggtgacagagtgagaccctgtctggaaaaaaaaagtacaaatgcacaaggaaaaggccaggaagggctggagtgcagtggcccaatcttggctcactgtaacctccgcctcctggattcaagctattctcatgcctcagtctcccgagtagctggctaatttttgtatttttagtagagatggggtttcaccatgttggccaggctggtctcaaactcctgggtgcaagtgatccgtctgcctcagcctcccaaagtgctcggattacaggcatgagccaccgtgcccagccaaagccacggacttttgacagcacagtccacccacgggtttccaggaggggctgatcttgaagcatggccttaacaaactgatttaatctttacttatttcagactgggtcacaatatgaagtcttgcaaggtatgtgtaggctgggggtgggtcaggggaagagacaacagccatgggcaggtctggcctgccagagttaagaaagctaggcagggccaacctagccttgcctatcaataacaggtagttattgataggcaagtcggcacacccctaagaaagcctactgggcacgcgtaatcgcgagatgacaacctcgtgattagatgattaggtagatgcctggatttactgattcaaccaggactgctgagaacaatgccttacaataaaacaatgtaatgcctctcgttccacaatactaacctcctactgcgtgcaaagcaggggttggggacccaatggtgaaaagatgagccccattatcttcctataattcagattttgtaccagcagatgcccatactgtaatcattcaatcctattaaatatcagctccattaaaggctgggcgtgatggctcacacctgtgatcccagcactttgggaggctgagagttcgaaaccagcctgaccaatatggtgaaactccatctctactaaaactataaacttagcccagcgtggtggcgcatgcctaatcccagctactcaggaggctgaggcaggagaatcacttgaacccaggaggcggaggttgcagtgaactgagattgtgccattgtactccagcctgggcaacaaaagcgaaactccatctcaaaaaataaataaataaataatgaaaaaataaagatgtgaaaaacagagactctgagaaataatgtcactcgtgcaacataacaaaagttattgacagataacttttgagcacttactttgtatgtgccaggtatgattctaaacaatttgttatattaacaactctgaaatagaaactattaccctatttgacagaaggggaaactgaggcacagaggacatgaacttgcccaagctaacatgttaagtaaactgcagagccagtattaaaccccagacatgcagttcccacaccctctattggaacccttcatttgtacccctctgatcatgtttcttctgtaaagattgcaactttctttcctctcacagagatgttaagatgggacaggaaagcctgggaggttgccttggttaggaaggggtgggagtcgaccacccattcctgtctcatttctaggacttccagaagttgctctgaaagtgttaagatgcagtgcgatgctgctacttccaggtagagttctagtagcaggtaccagcacaaactctcctttcttaaggccccaatactgctgcgaatctgcctcacttcagtgatccagataaaaatgttcggccgggcacggtggctcacaaggtcaggagatcaagaccatcctggctaacacggtgaaactccatctctactaacaatacaaaaaattagccgagcacggtggtgggcgcctgtagtcccagctactggggaggctgaggcaggagaatggcgtgaacccgggaggcagaggttgcagtgagccgagacagtgccactgcactccagcctgggcgacagagcgagactccgtgtcaaaaaaacaaaaacaaaaacagataaaaatgttcgtcaattcccagaaccctggcaactatttatctgggaaccgccaactctcagataaatagtatctatctgtatgattttccaagactggaaaccagcactagtgggagtgctaggtggcacaatctttctagaaaagcaattttgacaattatgtgtcaagaatgttaagaagtgaaactttttaaaacagtttctcttgttagggaaggaaatacacgctgctggtacgagtgtatagacagatacagctctttcagggagtcatctggcaacatcttcattttagtacaattttcctttgacccagcaattcctgctttaggaatttcctcaatgtacttgcagcatttctcatgttaacaaacagcaacaaaatggatgcaccttggtccatcagtaagattttggttaaataagttagggtgcagaaaaggcgaacgctttatagcctccagaaataaagaagaccaaggctgggcacagtggctcacacctgtaatcccagcactttgggaggccgaggtgggtggatcacctgggttcaggagtttgagaccagcctggccaacatggtgaaactctgtctctactaaaaatagaaaaattagccaggtgtgatggtgtgcgcatcgctggaatcccagctactcgggaggctgaggtgggagaattgcttgaacccgggaggtggaggttgcagtgagccgagattgcgccactgcactccagcctgggcaacagaacaagactgtctcaaaaaaaaaaaaaaaaagaaagaaagaaagaaaagaaaagaaaaaaaaaaccctcaataaagcccatgcaaaaacattaaccactccatactactttttagaggccaaagctaaccaccaccaacctctccaagcaagaacaaaaacatacttcatactcttacaccttaaggcaagcttgtccaaaccaggcccaggccagctttgaattcagcccaacacaaattcataaactttcttaaaacgtgagatagttttacaatttgttttaagctcatcagctatcattactgtccgtgtcttttatgtgtggcccaagataatccttcttccaatgtggaccagggaagccaaaagattagacacccttgccttaggtcgcttatcttcatagccacataatcaaacaagctcctttgtttccattttgcagatgtggaaaacaggctcagaactaaatggctcaagatgacatactgcttgctagtcacaatacagaggtgacttaaatactatttaacagcactaaaattagtggcccaattcataatcgtttcttctagagcggagtttctcccctctgtgggagaaacttttttattttgcccctctatggaggcttttaagttatttttccctaatagctccccacttataaagttctaatatcacaaacatattatatacatttatctcctttggaaggccacaaaccactgtactatcaataaaacgttttcatcccattggtgaaaatatcacttgattgaaaatgcatgttctatttaacacaggcatttttaaacagggggtctatgaaattagataagaaaaaaatactaattttcactaagctgaactaaaattcaacctttctttcaatgatgaatataagcaacataccacagtggtattaatagaacttgtgactttgtcatcagtggagaccacagatattttcatatagtgttacaagttgttatgacttggaaattcttgttatctgacaggctactagatcttgttatttattgtattaataaagtagctgatattactaagttaaaaatgttttcatttttgatgactgtatttcaatgcaatttatttccttggtcatctatgtattttatacactatgttgagaagggatctatggcacaaaaaaggttaagctccctcccctagaaggatccagcagttcccagagtgatttacagcctgaataccagcttgcctttgctgtatacacaagcttgcctcttctgtagcctccaccagcaacatcccacttgactcttaaaacagcagcagctctgtttgcttgtgcagtaaaaagtgcttctacatccaggccaccactggtaaataccgcaactgtatttgccaaggagtaagaagattctgttatgaacaattgctgggcatgcttaagttaaccaaaaaggaaaaaaaaaaagcaaagttcagagggattacacagcaactagttcttccatttctccaccccacccccaccccgaattttaggaatgttatcttgcagcatctagttatccaataagttggaagaatgcagtaaacccagcaggggtcttagattcaatcactgccaaatggatagaaaatactcttactattgtataggaagaaagttcatctactagtggccaatcaaattctggagacactgaaatgcttaaaaagtaaaacctgtatatcttgataaaagcattatgactcaagcttatctttttttcattcctacatttaaagaacgacaatgagtagattatctaaagcacacaacatcttctaccctcccccaaccccaggataattgcttaccaaaaaacaaaaggaaattatgtgccttcttaagtatttaaccagttgaaagaaaactgcctctttagcagcttaattttagcagtcaaaaagccttcaactcaattcatagaaggcagataagactttaagtttccacctaattaagatctaaaaaaggcaaagtttcaaacagccttgaaccaaaattcggggatgctgctggagaggaaaaaaagagtaaatggctcaaagaaagtttcacaggcgctaaggcgtgtgacttctgtttgcttccaaggttagggaagtgtcccactcgtccccaactagagatcaggcaagtttgcaaactccatgagggcaggggtttttgtcgcctgtctccagagcccccctgaacaaatcctgacacagacatacaatttgttggggcgggggtggggggggattgtggtgactggcgatgcagttcttatctggatttagtggcttttaaaaatgtttagacattttaaaaaatagtcaaaagtactgtaggctaaaggtgatgaggaagggacaacttctggaactcttttcgccatcaatttttccagggtagtacaacccagagaagccgaccaaactccaacattgttttatttctgggacctcttcatctaaaccgtgtgaaggcacatcccaacatttaagatggcagaggagaggccaccaaacccaaccagccaagcaccaatcacggctcccttgtcgaagatgccaaaaagaacatctcatcacatcaccaactgacctaaggttatttttaaaaaaccaataaaaacaaaacaaaacaaaacaaaacaaaacaaaaaaaacagttccttgggctctggggcgaggcaggacaagacaccatgggccatcaagcagggcaaggcaccacgggcaaagccatttcaaacaggtgctgcaatttaaaatgagtaaaaacatgactatcacttttggtctttaatatcttgaattaaagatagcgcactcgagtccccagcctggtgtctggcaggcagcacactgccatttctgctagattgcctcaactggcagctcaacaccatcttgacacaataaacacaaataaaaacattttggtattttgaacaaaattaagactgatcacattcccaattcatagtagcccttctatagttgaaattatctaaacagggcattttatcactgctatatagaggaggaacccaaaaactcagaaaaaacaaaaaaacagaaaacgccaccaagctggcttcaaggttacacagctgaaagtcacacagccacagtggaacgcggatcccattctaaaacctgacttcccaggcatcaacctaacacttcacattttaaaaaaggaaatgctaactgccttctgcctcccaagatggttccccaacccacagcccaggaggaagctcactaacagcagcacgaatgacaaagtatcatttgcttctgcactgcacatttttattcaacaaaaggagctgtttggcaaattgtagcttctctccctatgggaaacccacatgaagtctaacgtagaaagttgacctgaaacgttaactaacgtcaaaatccttctaagccagcgtaggtcattttggtgagtaattggaaataggaagttattcgaaacttgggaatcctaatcgttgatgtttgtaatccagtttagcacaaagggcatttgaaactcttttgagaaaatgctaatttttcctgtatgtagtgttagccctgcgaccacctgcagattttttgatctgctaattgatcgccagacgtcattttcctccctcaaaaactgcattctcgaatggctttgcaaaataagaccagctcaatctgcattctaaaaaattatgtgagacatatacatacatctaagttagatatgtatgtctacattatatacctaacacatataattttaggcagctcaaatgcaaacaacccaaacgcagccattaaaaacgcactgcttgggaaaacaaccttctctcccaaggaggcaattggaggctctgcaaacacattctagccgccaggagttattaccaagaattccacacttggcaaagaacagcgggcacagacgacgatcaagcaggcgaccggcacgaatcccctagggtacccatccttggcccagcccagcactctccattcacccccacaacccgtcccacccaccaggtgtgagccagtacctgcgaagggaccccgcctcccagcaaagggctaggcttcaagctgggcctccagggggcgcccgcgcgcaagccgggtgggctgtccgcgacaaccctggtgatcaatagccaactcccctccctcccaaatcgcagtggcagcgcacggccaggcccgaggttttagctcagctcaggttgactctgattccaaactccaaccatcgttaatttcagaagccctctcgtaacaagcttccctcccgaaaggtgccaaacaccaccaaaagccccacgtgtgtgcgcccacccaaaatgaagggggaaggggaggtcagcgtaggaccaggggaggggtcagaaccaggagctcgcccctcctctccggaggaagcaggcgggctgagggttaacccttttgttccaggtgggccaggccacgaagccttcacgctcccctcaacccccaccccaccccgcccccaaccaaggcacaaagagagtccctccaggcgcctgggacctcgggtgcgcgctgcgctgaccacccggcgccccgaaaacgcccagccatcccctccgtcaagccgatccttttaatttgccctggaaaaatgttaaacggggaattctattgacgtattataaacttgggaaatgtattacattcagtctccgacaaaaaggcggggatacggaagccaaaaagtggcgaccgtcttctcgggaaaccccgggtatcagagatggtctctgagagtcctccggggttgccgcgcacacccgtctgctgcagggaaattagaaagcaggcggggagcggagcgacgaacaaggccggagaggaggctacaaatcccccctccccccacgcgcacgctaaaaacttatcaggcgacaatttggcgggccgggatggagacgagatagtggaaaaccgcctcgctcctaaaacctccgcggtgaagtgatgaagtgggaacagagttggccccgccgttcctggcgcggctggggtcccgaactcccctcgatctgggaaacgctggccgcggaagcgtgggccaggtcagccgcgggagttcgctctggccccccacctctcccctttcacacccaagcgcaaatgtggaaagccgagcgctccagaaaagccacgcaaaacgggaggccggtgcaccccagtggggctgccgcgcgcccgccaccccggccactgggggctcgcaccctcgggcttgccgcggttatttttaggaagtcggaaatcaaagatggctggaggtcaggccccgaaaggttagggcgaagatcggcaggcggcgcagcccgggcagaaaaggcgaaatccagaaaagaaaaaaattttaaagggaaacattgagccctcctcccccacctctctgggccctccaatcccctgcgcagcgcgggtggcccgcaccccagctcctgagggtggggagaggtcgcgccccctccccccacttggcccgggaggggcgcgtgcaacagatcgtcctcctccggggggtcttccaggggtgcgcccctcctccagcctccaagaaaagccccaaggggctggtggagagggtggggatcccccggggttctttcttttgagagcgacgcgagggagggggacctaagttacaaggggggggggtaacaccagtgaggggagtggaaccaattaagtgaggggcagaggacaaggagaagggaacctttcgggagcgagaacagaggagcgagtgggggtcaattttacaattaggggagaaagctgggggtgaaacttacacaagaggggagaagaggaaaaaagtgtgaaatgtgcaaaaggcggggtggtggggagaggaggagacctctcctcccgggcactgagcccccaaatctcggctcctgaatttgcgctggacgccgcccgctccccgaagcctgcgccctcgaggatcccgcgtacgtccgggaagctcccctccccgggcgggcgccccagccccactcacccagctcccccgccgcgggcgccgctggggccgcatctgcaaactccggggtctgctgctgcggctgctgctcgccctggtcctcctccgagttgatgtgctggggtttcgcctgcttgcgcctcgacatggtgcgagcatcggggcgccgggagagccgcagttatttgccctctccgccacaaattcctggagttgggaaatttaccccccttcggccggaacgcgcatgtcccagtaattattattatcaataatgcattgcgatttatcatgagccctgacagctgattggcctgggtccaagacctcagagatcatttaaataagccctcattgatcagggaggggtgaggcattctgggctttgtagtccgggcctacttgtgacaaaggcgtgttcatcaggggagcgcagctaattagcatccgggctcagattggctggggcggggacgaaatcagagggggacccatccttgctccagctatctcagtccttggagaggaaaagaaaatggggagaaatgcgtactcattaaaaagtaggagcttacgtagaagttttggaacggctttatttggtagttacttgctccaaagattacttggtaaggttgatgtccaccagccgagaagggagatctcttcacagtggaatattttggctcagttttcacatctacacgcacacacattcccccaaacctgagatgtgacccgtgtcccctcccatctttttgattaaaaatgtttaagttgagtctcgagataactgaagaatgatgaatggtggtgttttcagccctcccacccatctcaactcttaaagtgagctcggaacttccaaaatttcagataccccaccaccaccatgacttacctcctttaaaagctgattaatagcctccaggattcctgttcacaaagactggtttgtggttacaatgcaaaccttgatttttttttaacttcaaaatgactggctactaaatatagaaatggcaaatgataagcaagcatagtcagagataatatcaaaacagcaagcaattgcatttttttccccaggagccataaatgcctgataacatcatattttattactgagacaatgctcttgcatctcccatggaatggcaatggggcactgtcacagtatctggttgttactaatcactattggaatttttttgtgcaatacacacattattacagaaaaggtgtatcgttcaaagtgattgtatcattgacacatgatgcctggaattttttaaagtggggcttgtgtgtgtgtatatgatatattacatgtatacacatttataccgtaaattcatgtatacttaatttggctaactgctttacacaatgtacatgctcaataaatgttaaatgaatgatgaaatcatcaacctgctaagtctttgattggtctttccataactgctctgggcatgcgtctttgtttggcatttacttcattgtaagggactgtgcagatataaaccctccctccacatttgtgcattgcattctcttgattagttattcatcacgttcccagcttgtaaactcatcaggaatacaagcaaaatggaatgctgggctcatcaatgtgttcacctgggtatttggacaacccaaggcagaaaataaatcagcttgatcatcttttttatattcgtggccatcagtaaaaacttgttgaaggaagattaaccttcaatttttgagtctctgaaaaagtcttgccttattttatgtataatatttaaagcaagtaagacagaattatagccaacagccagattgaaaaggtaagaatttggtttaataatacatagaagcagtttagaattctgatactgagtaaaaaggccaattagcacctgccttgctgactaatctactaatattctcaacaccttttctgtgtaagatagtgtggcaggagatctaacttacaaatctaaacgaatgtgcagtgggtttatggctcaaaaaatactattgggttaaggaaaatttcatttatatagttgtttatatttattttagtagatgatagttgtaacatgttagccttactacgagacaaaattgtgccgcttgactctccaagtgatagtaataataataattgattgagccccttgtacatgccacagactgcattaaatgaatgcacaccgccttgttttatcttcccatggaggttggccctattgtcctctccattttgaaactgaggctcaaagacatgaagtgacttaattagaaactggctgagctggtggtcagtttctaagccggtggtcagtttctaagtctgactccaaaattctatcacatcctaatacctgtcttccaactatagctgaatatagagaagatagctaaagaagaaaaatcggagtacagtaaactaaatttaaagtgtcctagaaaaatcttgggtcttcagaaatcactccaacagatgaagtcaagaagtttccctcaaatggaaaccttccacaaatgtcatatcaagaaaagcaggacacagtacatgttttgaatctacccccagtttaacagctgcagccaggagccagttggtggaaaataaagtaagtcctagagcaaagcaggggatgaacggagggcatagcaacaggcaagtccgtaatcaaaagttgtttcaggctgagcacagtgtctcacgcctgtaatcccagcactctgggaggccaagactggcgggtcaccagaggtcaggagttcgagactagcctggccaacacggtaaaactccatctctactaaaaatacaaaaattagctggttgtggtggcgcatgcctgtaatcccagctactcaggagcctgacggaggagaatcacttgaatccaggaggcggtggttgcagtgagccaagatctagctactgcactccaacctgggcgacagagtgagactctgtctcatgaaaaaacaacaacaaaaaagttatttattaaaccaaaggacctggttgggacccaagcttgaaaagaaaatgttcagagtaaaggatgatattaaactttttcatgttaacgtcctttgttaggtgactgggtttatataatccagtcattgtcaatgtttatgtaatccagtcatgttcaatgtttgtgccaggcaggaatattcaaaaaatacacttcttggtatatttttcagcagtcttattgtttataaggagatttgggatgcataatcccattttatcctcactaatatccttttttaattcctttttttttttttttttttttttgagacagaccactcttgtcacccaggctggaatgcagtggcacgatctctgctcattgcaacctctgcctgggttcaagcgattctcctgcctcagcctcctgagtacctgggactataagcacatgccaccacactcggctaatttttgtatttttagtagagatggggtttcaccatgttcaccagttgtctccaactcctgacctcaagtgaggcccacctcagcctcccaaagtgctgggattacagacgtgagccaccgtgtccggcttatttctacttcatttatggaaaaacagaagctcattgctcccatcagctcctagcgagtactaacgaatgcatgccaaattatggattcagtaactttgcacaggtctcagtggaaggcagatctttccctgaaaaccccacctctgctcttttctacaaggaatcgtcttcctttccactgcttgcctctcttcacctggcccactcctaaaaagcctataatctcttcaaatttcccttccttaaaccagccttccctcttccaaactaggtctcatttattagttctctcaggcttcaagaaaccatatctttctttttatagcgcacttcaaaatatataatgacagactttctcatgtatctgtttattgcttatttctcacactgcaggctccgtgagggtagacaccgtcatcacggtgtccttagcacttagccacagtaatggaacacagaagtcacaacaaataaatagcgatggactcaatccatgctgagtaactttagaggcctgaatatgaaatgaagtgttaaaggcaatatagtaggtgggaatgtaaaatgctgcagccactctagatggcagttcctcaacaaatgtaaaaaaggattaccatatgatccagcaattccacatgtgggtatatatccaaaagaattgaaagcagggtctcgaagcagtatttatatacccatgttcacagcagaattattcacaatagccaaaaagtggaaacaactcaagtgtccatggacagatgaatgaataaagtaaatgcagtctatccatacaatggaatattactcagccttaaaaaggaaggaaattctgacacatggtaccacatggatgaatctttgttttcttttgggtttttttgttgttgttttttgagacagagtctcgctctgtcacccaggagtgcagtggtgcgatcttggctcactgcaagctctgcctcccgggttcacgccattctcctgcctcagcctcccgagtagctgggactacagaagcccaccaccacgcccggctaattttttgtttttttagtagagatggggtttcaccatgttagccaggatggtcttcatctcctcaccttgtgatccgcccgcctcggcctcccaaagttctgggattacaggcgtgagccaccatgcccagccaacatggatgaaacttgaagacattatgccaagtaaaatgagccagtcacagaaggacaaatagagtagtcaaattcatagagacaaaaagtagaatggtggttgccaggggctggagggagggagagtggggggtggaggggccgtttctgctcaataggcatgaagttccagttttgcaagatgaaaagggatctagataaatgtttagattttagctgctttgccacaaaaacaaacaaaatcaggtaacaatgcaagacggataggttcatttgcttcactggtaatctttttactatctatataaatcccataacatcatgtagtatgccttaaatatacacaataatttttttttttaaaagatctggactgggcacggtggctcacgcctgtaatcccagcactttgggaggccaaggcaggcggatcatgagttcgggagttcgagaccaccctgaccaacatggtgaaaccccatctctactaaaagtacaaaaattaaatgggcgtggtggtgggcacctgcaatcccagctacttgggaggctgaggcaggagaatcacttgaacctgggaggcggaggttgcccagatggtgccactgcactacagcttgggagacaaagcgagactccaactcgaaagaaaaaaaaaaaaagaaaaaagaaagagagagatctggaaattggttgctcaacaatgtcaatgtactcaacatttcaaaacagcacacttaaagatgggtcagacagtaaatcttatgttaagtgtattttaacacagttgcagagaaaaaaaggcaattacaaactagattatcacgatggctgcatactgtatggatttactaaaaataattcaactgtacactcacagtgagtgagtttcatgatatgtaaagcatatgtacatgaaatggtttttaggaagacaattacatacttggctatccctgtcattgaaaggaccacagttatgtgtgtgtttttttctgtgtgggattcccagcatcttaagctcgaaatgactaaagtagcgaggttgagtcccataaatcatgatctgccactgcaaaagtattgcccctttggacctctgtttattcatgccaggaagcaaagtcgactgacttggtaaccacagctgcttcaatttgggaaatgtaagggttggatttgggaagtatcttaacatggaccaacgtcttagagtctatggacttttatgtatcatagtacatttgatatctgcctaccccaaatggaaggcttgatgtctggaaggcactcttcaaattctagagatttagaagttaagctaaaattgcctccaaaatcatgcttgtaattcaatgggactgttttattatggggccaaatgtccacttttctgagtgtcctggcccagagcccttctgctgggacgatttatgttcgcaaagttggctaattgcaataatcaccacttaactgatgatatttcccccattttaatatctctctgcttgttgccatttcatcaattccaaattggtattgaacaatttctagctccaattagtcttcttagttgcagctgatgtattgaagcctacaactgtgtattcaaaaaaaaaaaaaaaaggtaaaaatattccaggccagacaccgtggctcatacctgtattctagcactttaggaggctgagaccagaggactgcttgagcccagcccaggagtttgagagcagcctggacaacatagggagtccccatctctacagaaaataaaccacaaaaaaattagccaggcatggtggcacgcacctatagtcccagctactctggaggctgaggtgggagatcacctgagcctggagaagtcgaggctgcggtgagctgttatcgtgccactgcattccagcctgggtgacggagcgagaccctgtttcagaaaaacaaaacaaaacaaacaaataaattaatcaggcatggtggtgtgtacctgtagttccagctactcaggagactgaggtggaaggattgattgagcccaggagtttgaggctgcagcgagccttgttcatgccactgcactccagcctgggcaacagagtgagagtcagtcttaaaaaacaaacaaacaaaaaagggcctggcacaatggctcacgcctgtaatcccaacactttgggaggtcgaggccagcagatcacgaggtcagaagttcgagacagcctggccaacatggtaaaaccctgtctctactaaaaatacaaaaattagccagacgtggtggtttgcgcctgtaatcccagctactcagaaggctgaggcaggagaattgcttgaacccaggaggcagaggttgcaatgagccgagatcgcgcaacagcactccagcctgggacagagtaagactctgtctcaaagaaacaaaaaaattctgtctgggcgtggtggctcacacctgtaatcccaatatttgggaggccgaggtgggtggggcatctgaggtcaggagttcgagaccagcctggccaacatggtgaaaccctgtctctacttaacaaaaaaaaaattagcaggcatggtagcgggcgcctgtaatcccagctacttgggaggctgaggcaggagaatcacttgaacccgggaggcggcggttgcagtaagccaagatcatgccattgcactccagcctggacgacaagagcgaaactccgtctccaaaaaaaaaaaaaaaaaaaaaaaaaatttccaacaagcttattaaagcaagagtgaattgtcagaaatgatactttcttctgtaagtttgctggttaaagactaaatggattaagaataaaagatttggccgggcatggtggctcactcctgtaatcccagcactttgggaggccgaggtgggtggatcacgaggtcaggagatcgagaccatcctggctaacacggtgaaaccctgtctctactaaaaatacaaaaattagccgggcttggtggcgggcccctgtagtcccagctactcgggaggctgaggcaggagaatcgtttgaacctgggaggcggagcttgcagtgagccgagatcgtgccactgcactccagcctgggtgacagagcgagactccgtctcaaaaaaaataaataaataaaatagtttgtgtgactagctttttttactcctcagtcgcttgaaactcatgctagtccaagcatgcagtctttcggtcaatctcaggcacacacatacagtcgagaatgttggttctctaagtccacagcagcagttcttaatgggaacaatgtgccttttcccccaccaggggacatttggcaatgtctagagacattttcggttgtcactactgtctagtaggtagaggcccggggtcatgcttaagatcctacaatgcccaggataacctccacaacaaaggaatagctgacccaaaaggtcaacggtgccagagatgagaaacgaggcttacaggtaatatgatttcaaggctatattagcacctaactaataccattaaaaaaaaaaatagtaaagtcctttctaaaaagtattaagtcacaatcaaatcctcttatcttctccaggggaggcttcttaaccttcccaactaaatcaaacttcagcatttcgaccctttccctcaaagattgcacaattaccgtcttatattcactcatgtgatgatttgagtaatttatctacttctccgcctgcagattagagaaagataacattttggaattctgtttatttcactgaatgggctatcataagattctcctgccgcattgaaagaaatctttgtaaatgtgttttgttattttttcactctgtggatgaacctttaattcacttaaccaacccctgttgagtatttgagatctttgtctttactttagtaacatttcagggaacgtctttgctcatagacggctctgtccaaattttggatttcttgccttaaggcctaccatcttgagtctttctgaagtgaatgttgaaatgaatttcacagattcacagccctttgagagcttttttcaaatactatcttactccttttgtaggctcttgtgcaagaccagggcctcagtaacatgagtgatcaagctaaatgggtcatctcataaacatgcttatcgggacactcacatattgcgtaactggacagcagaaatgtatagattttcaaaaacaagtcaaaggttcaattgattgaacatttttttttctgctagaaatgctttccttttcatttcctttttacataagtctgattcactctttacttaaatatttctgtactggcgtccaaaacccttcttaaaagttttctcttgccttaaaagaaaatttttttttgttatctaccaggcacaaatccaaccccttagtcccctaaaaagtgcctattgtaaactctatgtttaaaaactattactgagaaggcgcttcttcaaattcgctgcaaactttattataacaaagcttaaagagctaaaagcgcggcacaatggaaagttgactgttataaatatctatccggctttgcaatataaattataattaaaaataaacttgtcagagaactctaggcaacacacaaaaagtgagacgtttagaacgaggcaattaagaatgttaattggaacacagagaaaagcaaaggacagtcattgttaagataactgctctataaacacctaaatggattctgtgaaggggaagaaaggatcatcttttgaccatgaaagggaatataaaatgttcttttctttgttttaatgtgtggagagattttaaacttcttttctcgctcagacgctcaagtaaacaaatgacttggccctagtctggtgtgggtaactaaagagagaaatggagggaaagagagaaaagccaactgggtaggcgagaagagaagagagcaaatgctgaagaagaagaaaaacaaaggaggatgataaatgtagaggaataaagggaaaaaccaaaacagaaggcataaacccctaggaaacagaacaagagttaaacacagagaataagaaaggagtcatctccctttcttcactctccaaatgatctgcaagttaatttcttaaagacagcagagtcgacaagcacagtcagacagacccagatgtagatcttgcttcttggcagtttccatctgggctggataatttcctccaggttctcaacctctctatgccttgatttcttccctagtcaatggggagggtaatcgctgcttgtggcttcgctgcaaaaatcagaaatgatttgtgtgaagcccctggcatataattagtgtttaggaaacatctattaccacatgaattatttcagggtacagcaggaatgtttaagctttctcataatattaagcagacgcacaacatacatgatagttttggagtcggagttatttaatttacatggtcatttatttgatcattcattcattcaaggagtaataattttgtctgctatgcacagggccttgagctcacccagtgctgggaatttagacatgaaaaaccttaagtagttcagcctaaaatgtctaaaagtttaatgtcaaaattgttggcttttgcaaaaatgttagcctgtgggccaatggtggtctatggtacattgactctgcctagaatatggctaggatgggatggaaacacgaaagacatgatttagaacatattcttttccagaataagcattccgtgacagaaggggccatattcatctcattcaccgttgcataaacaaattgcattgcataagcaaatatctttaatgaacagcatctaggagcacgtgctttgaagacaaagcaaggtaaaaggacagaggccatcagtggatgcttttcttgtagggtgatcaggaaaggcttcactgaaaaggagacaagtggccgagacatgaaggaggtgagggagaaagtcatatagatctgtgggaattgcattccagacagaggcaacagacaatgcaaaggccttgaggcaggaacgtgcttggcgtgtttgaggaaccagaaaaaggccagtggggctggggtggagtgagtgaggagtaataggggcagaggacatatgaccttagagatcatggctctagatactttgttttcctattttttttattgtggttaaatatccataatatgaaatttatttatgtatttatttttctgagatgcagttttgctctgtcgcccaggctggagtgcagtggcatgatctcagctcactgcaacctccgcctcccaggttcaagcgattttcctgtctcagattccccagtagctgggattataggcgtgtgccaccacactcagccaatttttatagttttagtagagacggggtttcaccatgttggctggtctggtcttgaactcccgatctcaggtgatccgcctgcctcggcctcccaaagtgctgggattacaggcgtgagccaccgcatttccacttattttaaatgtcatctcgtagtggcagcttaccaaatagagatccatataactgctcgaaaattttaaggcttaagaaatactcaaaaggagtgattagtagtagaatgcttaataaattcttaattgtcaggctgggcatggtggctcacgcctgtaatcccagcactttgggaggccgaggcaggtggatcacctgaggtcaggagtttgagaccagcctggccaacatggcgaaaccctgtctctattaaaaatacaaaaattagccgggcatggtggcacacacctgtaagcccagcttactcaggaggctgagacatgagaattgcttgagcctgggagatggaggttgcagcgagctgagataatgccattgcactccagcctcggtgacagagcgagactctgtctcaaaaataataatgataataaaaaataaattcttgtttgtttgtttgttttgttttgttttgtttgagacggagtctcactctgtcacccagactggagtacaatggcgtcttctcagctcactgcagcctccacctcccaggttcaagcgattctcccgcctccacctcccaagtagccgggactatacgcgcgtgccaacacacccggctaatttttgtatttttagtagagatggagtttcgctatgttggccaggctgatctcgaactcctgaccttgtgatccgcccacctcggcctcccaaagtgctgggattacaggcatgagccaccgcgcccggccaataaataaattcttaattgtcctgcagcaaaaatgtctaagggaaccaagcatggtggcacatgcctgtagtaccagctactggggagggtgaggtaggaggatcacttgagcccaggagttgaaagatgtataccccacaatcgtgcctgtgaatagccacagtgacccagcctgggcaacatagtgagacctggatctctaaaatcaaaaaacgtaagagttgaaatatttagataggtttcatcttaatatgtctgccaagtcaattagcgataggacagccctccccaccccggtttttttgttttgttttgtttttaagaattttgctagggctgggcacagtggctcacacctgtaatcccagcactttgggaggctgaggcaggtgtatcacgaggtcaggagattgaggccatcctggctaacacggtgaaaccccttctctactaaaaacacaaaaaattaactgggtgtggtggcacgcgcctgtagtcccagctactcaggaggttgaggcaggataaccgcttgaacctgggaggcagaggttgcagtgagccaagactgcgccactgtacttcagcctgggcgacagagggagactctgtctcagaaaaaaaaaaaaaaaagaactttgcttttttttttttttttttttttttggtgacatgaaaggctgtcagagtgttttgagcaggggaatgacaggattttcctaggttttaggagaactctgagggaggttatagacccaagtaggtgggggataggatggatgtggggagagcagtgaggacgctcttgcagtagtccaggaatgagaaaatggagcttggaccaaggtggaagtggcaggggtgggagagataaaacagagatgtggggaattcattgtgatcatgtggctgatagaacttgcaaactgatcggatgcaggtataagacacaggggtcaaggatgacgcctagattttcagcctgagcatccaaaaggttgcaggtaccaggtagagaaatagggaaggctgtgggagacgtagatttggcagagggggtgcttcagaactcgtttggaacatgttaggtttgatttgccaattagacattcaagtggaaaagttagatcaacagttggagacaccagtctaaagttcagaggcaaggaccagcaggctgttgacatcagtatgagatggtttttgaagccgagaaactggctgagatcatctaggcagtgaatggagatagggaagagaaaagagcaaggatgaggcctggggaactcctgggtttacaggagggaagttgaggagaaaaatacataggtgcagagaaagagcagccagtgaatcaggatgacagagagagcagtccaggaagccaagagaggaacgtgcttcacagggaggcagggactcactgtccaaacatgacactgatgtgtcaaggcagacaagcattggaactgagtgttgggtttggcaacacagagacaactagtcattaagaagatgcctggggatacctaggggcaacagctgattggagagggttggggaaggatgagaggagatggcgaactctttagggtcaattcttttaaaactgtctcatggtgagtggggagtggggagcatcagggtgaatatgagtgtgagggagataacatagcaagtgctggatgacgttggaaggatccgagggaagaggaaatgttgatgatgcaggagagaaagggaacaattacagagtacagatgctccttgacttctgatgggtttacgtcccgataaacccactgtaagttgaaaatataataaactgaaaatgcatttagaggcctaggcgggtggatcacttgaggccaggagtttgagaccagcctggccaacatggcaaaactccgtctctactaaaaatacaaaaattagtcaggcttggccaggctcaatggctcacgcctgtaatcccagcactttgggaggcccaggcaggtggatcacgaggtcaggagttcaagaccagcctggataacatggtgaaaccccgtctctactaaaaatacaaaaattagctggacgtggtggtggtcacctgtaatcccagctacttgggaggctgaggcaggagaattgtttgaacccaggaggcagagcttgcagtgagccgagattgtgccactgtactccagcctgggcaacaagaaagagcgagactccgtctcaaaaaaaaaaaaatagtcaggcttggtagcgcacacctgtgatcccagctactttggaggctgagggacgagaattgcttgaacctgggagacagaggttggtgtgagctgagatcacgccactgcactccagcctgagtgacagagagagactgtcttaaaaaaaatgcattgaatacacctaacctaccaaacattacagtttagcgtaccttcaacatgctcaaaacacttacattagtccacagttgggcaaagtcatctaacacaaagcctattttataataaaatgttaaatagctcatgtaatttattgaatactgtactaaactgaaaagcaaaatggttgtgagtacttgaagtacagtttctactgaatgtactaattgcccttgtaccactgtaaaattgaaaaatcttaaattgaaccattgtaagttggttcatctgtagtgatctcaggaaagtaggaaagagctgggcatggtggctgctcatgcctgtagtcacagcaactcggggggccgaggcagggagatcccttgagcccaggaattcgagaccagcctgggcaacataaggtgactgtgtctcaatttattttattattatttttttgagacagagtctcactctgtcacctaggctcgagtgcaatggcgcaatctcggctcactgcaacctctgccccccgggttcaagcaattcttctgcctcagcctcgccagtagccaggattataggcgtgcaccaccacacccagctaattttttatttatttattttgttttttgagacagagtctcactctgtcacctaggctcgagtgcaatggcgcaatctcggctcactgcaacctctgcctcccaggttcacgccattctcctgcctcagcctcccgagtaactggaactacaggcgcccgccaccatgcccggctaatttttttgtatttttagtagagacggggtttcaccatgttagccaggatggtcttgatctcctgacctcatgattcacccacctcagcctcccaaattgctgggattacaggcatgagccaccgcgcctggccttttttttttttttttttttttttttttttgagacggagtctcactctgctgctcaggctggagtacagtggcgggatctcggctcactgcaacctccaccttcccgggttcatgccattctcctgcctcagcctcccgagtagcttggactacaggcacccgccaccacgcctggctaatttttttgtatttttagtagagacgaggtttcactgtgttagccaggacggtcttggtctcctgacctcatgatctgcccgcctcagcctcccaaagtgctgagattacaagcgtgagccaccacgcccggcccacacccagctaatttttatattttttgcagagatgaggtttcaccatgttggccaggctggtctcgaactcctgaccttaagtgatttgttcaccttggccttccaaagtgctagaattacaggcacgagtcaccgcacctagcctattttattttactttattttagttttcagacagagtcttactctattgcccaggctggactgcagtggcgcatatcagctcactgaaacctctgcctcccgggtgcaagtgattctcctgcctcagcctcctgagtagctgggattacaggcacgtgccaccaagcctggctactttttttgtagtttttggtacagacgcggtttgtccaggctggtctttaactcttggcctcaagtgatccgcccaccttggcctcccaaagtgctgggattataggcatgagccttttatattttatttaaaaatttttaaaaattctttaaaaaaggaagagatggagtgctggcctatgacatggtaacatagttcatccgctgcaatagcagggaaggcagaatagttgggtgcagttcaaggcaggtaggttaatttagcttgggaatgtgtgggagttcactactgattgcctctattgtgtctattacattagtgaaattagaaacaagagtaaggaagggaagaggatgctgagtgttagaagagagaaagaaaggggtaaaagtcttccaggagagaaagagaaagaatgaaggagggaaatgtagtggggtggctgggtccatgtgggcgctcatgcatttctttctttctttcttttcttttcttctttctttcttcctttcttctttttctttcttctttcttttctttctttcttctttcttttctttcttctttcttttctttttcttttctcttccttccttccttctttccttccttccttccctccttcttctctctccttccctccttctttcctttgttccttctttccttccttctctccctccctcttttcttttcttttcttcttttcttttctttcttttctttttcttgagatggagtttcactctcattgcccagactggagtgcaatggcatgatctcggctcactgcaacctctgcctgccgggttcaagcgattctcctgcctcagcctcccgagtagctgggattacaagcctgtgccaccacgcccagctaattttgtttttttgttttttttttttgagacagagtctctctctctgttgcccaggttgcagtgcagtggtgccatctcggctcactgcaagctccgcctcctgggttcacaccattctcctgcctcagctaattttgtattttcagtagagacggggtttcaccatgttggtcaggctggtcttgaagtcctgtccttgggtaatctgcccaccttgacctcccaaagtgctggaattacaggcgtgagtggacgcccggcctatttcttcatttttcttaaaattatatatatatatatatatatatatatatatatatatatatatatttaaatagatatttatatattttttttttcagagggatttgctctgttgctcaggttggagtggtgcgatcatggctcacggcagcctccacctcccaggctcaagcaatcctccatccttagcctcctgagtagctgggactacaggtgcacaacaccacacctggctaatttttttattttttgtagagacagggtctcgctatgttgctcaggctggtcttgaactcctggcctcaagtggtcctcttgccaaagtcctgggatgacaggcatgaggttcggcacctggctatggtcatgcatttgaagggaaaccagttagctgtggtagtgcttttttttttccctcagacattttcagtggtacctgtccaagtgcagaatggactaagagttggattgaaaaggaatggggtttagccaagcaagtacaacagagaataaaagaacaggggcactgaggctgaatgtgggggattacaatgatggaccctagactcaaggcctggtaagagaggcagagcaggaagaagtgaagaggagtaaaacaggtttgtgagcatggaggttgggggaaaatcaagcgattgttggacttggggtcccaaagggacaaagccagaaagattttaggggatagtcggaggaaaagatgcttgaaattgagatggtggagccgatgtcgtggctggaaaggatgagggtatggagcacctgctcaggtggggtggatgacaggagcctcatggagaggaggacaaggagctgagcagctgaggtatcaaagggtcatcttaccaaatactgaaaatgtcaagaagtattgtaggtgagcaagacagtcgggtgacagtgtctttaggaactgaggagtaggctctcgggtctgcagaagaggcaatgaggagggggcatagacaagaacaggtgagtctgagcttctgagtctcagctgaatgctttggggaggaagaatggataattgaggcctcaagaggcaagaaactcacttagcccaactccagtcagtgcaccagggtgacagagggaaacagagcccctggagagagctgggggagaagcagtgtccccaggggagaaccaagggccaattagggcaagaacattccaaaaaaaaagtgaggataaaggagactttgccatgacgaaccagaagacactgaggaagtgttgggggtcggtgacagggctgaggattgggtcagataagaaacaggtttatgggccgggcgcggtggctcacgccggtaatcccagcactttgggaggccgaggtgggtggatcacaaggtcaggagttcaagaccagcctggccaacatggtgaaaccccgtctctactaaaaatacaaaaattagctgggcgtggtggtgcgctcctgtaatcccagctactcgggaggctgtggcaggagaatcacttgaacccgagaggcagaggtagcagtgagccaagatcacgccactgtactccagcctggatccagcccaggctacagagcgagactctgtctccaaaaaaaaaaaaaaaaaaagaagggctttatagaattggtcacgtaggaccagacgctgtccgaaccactttgcttgtatctaatcgtttaccccatgggataattactattattaacagatgcattttccagatgagaactttgaggtatagaaagtaatgaccaagattcagctatagaactaggccaccgcctcaggaccatactgggtgtcagcccctgagccaaatccagcccaccacttgtctttgtatgaccttcgagctaacagtgggctttagagatgaacatttcaatctatttgatgatgaacatttactttgaatcccagttaaccaacatgtcatcccctctaaaagaattccattcttctcattagtagacctatattaggagaaaattaaattgttattatattttgaatttcatcaattgcaaatttgtgaaaatttgttttctcacttgtgtacctacatcatattcttgattgtgcctcttggtctgtaaaacctaaaatcttccctttccttccttccttccttctttccttcctctccttctttccttttctcctttctctctttctctctttctttctttctttcttactttcttttttgagatagggtgtcactccatcactcaggctggagcgcagtggcacaaacatggttctgcagtctcaacctcctgggcttaagcggttctcctacctcagcctaccatgtagtgagactataggcacactaccgtgcgtggctaatttttttttgttgtttttttagacggagtctcgctctgttgcccaggatgcagtgtagtggcacgatcttggctcactgcaacctctgcctcccaggttcaaacgattctcctgcctcagcttcctgagtagctgggactacaggcacccacctctacgcctggctaatttttgtatttttagtagagacggggtttcacgatattggccaggctggttgcaaactcctgacctcaggtgatctgcccgcctctgcctcccaaagtgctgggattacaggtgtgagccactgtgcctggcctaattttttatttttatttttttgaggcagagtctcactctgttgcccaggctggaatgcagtggtgccatcttggctcactagaacctcctcctcctcccaggtttaagcctgattctcctgcctcagccacccaagtagctgggattacaggtgcacaccaccatgccaggctaatttttgtagttttaatagagacggggtctcaccatgttgaccaggctgttctcaaactcctgacctcaagtgatctgtccaccttggcctcccaaagtgctgggattacaggtgtgagtcactgagcctggcctaatttttcttttctcttttttttttttttttttttgagacggagtctcgctctgtcgcccaggctggagtgcagtggcacaatctcggctcactgcaagctccgcctcccgggttcacgccattctcctgtctcagcctcccaagtagctgggactacaggcacccgccaccatgcctggctaattttttgtattttttagtagagacggggtttcaccgtgttagcgaggatgttctcaatctcctgacctcgtgatctgcccacctcagcctcccaaagtactgggattacaggagtgagccaccgcgcccagcctggcctaatttttctgtagagacaatgtcttatcatgttgccaaagctgaactcctgggctcaagccatcctcccgccctggcctgccaaagtgttggtattacaggcatgagccaccatgcccggcccctaaaatatttctgtctgttcctttacagaaagagtgtgccaacctccgtattatattcacatatctctcggtggaggaaatgctcaataaatgtccgatattattgttgatattattatcatcattgacacctaattcacaggacttcaaaacaagctagctatgattccagccctgcgctgtcacgcaaaagatattaaacaaatgttggctaggcacagtggctcacacctataatcctagcagtctgggaggctgaagagggtggatcacctgaggtcaggagttcgagaccagcctggccaacatgacgaaaccacgtctctactaaaaatacacaaattagccaggcgtggtggcgcatgcctgtaatcccagctactcgggaggctgaggcaggagaatcgcttgaacccaggaggcagaggttgcagtgagctgagatcgtgccactgcactccaccctcggcgaaagagtgaaactccatctcaaaataaataaataaataacaaaaaacaaaggttagctattgaatgaatgagtgagtgagtgaatgaatgagtgggtaggtgaagtggaggaggatgtgaagttggtgggagtgagggtgctagaaatctccacatctttcaccaaggcagagagcttatcgggggaggaggagcagaagcagtgagttcatttccagaaatgttgctggaggtgagttgactagctccacataaaccctgggaatgatcactgaagctgggtaatttcaccattgtcctcagtatctgacccccgatggaaaattccacagcttcactaaaagacctgtatacctctggaatatttttatagggaacataaaagaaatgaatgtgggatttgggggactggggagaagattctgaggagctggtcctctgagaagagttaatcaggcaagtccagtaattatctggttccaactacatttgaaacactgtgctgggtcccttatgtaattgtccttccaactctgagaagtaattttatcattcccttttcacatatgcagaaattgggattgaaagaagctgtgctccatcccagggcattgcctcctccagcactgggtctaggctttgcatcaacctgtctactgccggttggccatttgtgtcttcatgctacccacagggccctcgaggctctacctctgagattcagcaaaggaggtcctgcctcatggagctcacagtccagggagaaagacagacaataaacaagcaaacaatacacaaataaaataggccaggcatggtggcccacacctgtaatcccagcactttggaaggctgagacgggtggatcacttgaggtcaggagttcgagaccaaccatggccaacgtggcaaaaccctatctctactaataatacaaaaaattagatgggactggtagtgagtgtctgtaatcccagctactgggaggcaggagaatagcttgaatccaggaggcagaagttgcagtgagccaaaattgtgccattgcagtccagcatggatgacagagcaagactatgtctctaaaaataaaataaaataataaaaaaattggctgggcacagtggctcacacctgtagcactttgggtggccgaagcaggcagatcacctgatgtcaggagtttgagaccagcctggccagcttggtaaaaccccaactctgctaaaaatacaaaaattagccgggcatggtgacacgcacctgtaatctcagctactggggaggctgaggcatgagaatcgcttgaacctgggaggcagaagttgcagtgagccgcaatcacaccattgcatgatcaactgtctagcactgagcaacagggctagactccatctcagaaaaaaaataaaataaaataagaaatgcaaaattgttacaggagttgtaagggaataacaagataatagaattagggagagactgcaggtggaggccagatgagatgttcatgggtgcccccttggagcagagacctgtagagctacaggaaggatgttctagaaaacaccaagggccctgaggtaggaaggagctttgaggcatcaaaaatgaagctactgtccttggtgtacagccaagaaaaaaaaggtgggagaagttgaggttaggggtgggtgggaccagatcacaggggccttgtaggccctgcctgtgatttgaatttcattctaagtgatgggggctttaagctggggagggaggtgacctgattcaccctggaaaagagtgccctagatgcttgtggagaagaaaatgaagagggcaagatggaaggcaacctcgagacagacctcaaggatgccattccctgcctcacccccatcgctccccagaagcttgggtgaaaccaccttccatctggtccttccagttcctacctctctaattgagagggagcctagcaagttggggtagggcctgctatataattagttaggcccagtgcaaaatgaaaataaggactccaagccgggcgtggtggctcgcacctgtaatcccagcacttcgggaggccgaggagggtggatcacaaggtcaggagatcgagaccatcctggctaacacggtgaaaccccgtctctactaaaaatacaaaatattagccaggcgtggtggcgggcgcctgtagtcccagctacttgggaggctgaggcaggaggatggcgggaacctgggaggcggagcttgcagtgagccaagatcgcgccactgcactccagcctaggcgaaagagcaagactcagtctcaaaaaaaaaaaaaaaaaaaaaaaagaaatgcaagatgctaacagcagagtgttcagccaagcatgatgcccttctgagcacagaccccatgaagttgacagtggggagaagactttggacccaatggttagggaggctgctctgagaaggtgacacctgacctccttcagagatcatggccttcttgggcctggtgcggtggcttacacctgtaagcactttgggaggcccaggcaggaggatcaccggaggccaggagttcaagacaagtctgggcaatatagtgaaacccttgtctctatcaccgtgcccagcctacaaaaaaatttttaaaaatattaactgggtatggtggcgcatgcttgtagtcccagcttctcgggaatctgcggtgggaggatccattgacttcaggagttcaaggctgtgatctcactgctgcgctccagcctgggtgacagagccagccccttgtctttaaaaaaaaaaaaaaaacaggctggttgcggtggctcacgcctgtaatcccagcactttgggaggccaaggtgggtggatcaactgaggtcaggagttcgagatcagcgtggccaacatagtgaaaccccatctctactaacaatacaaaaaattatctgagcgtggtggtgggtgcctataatcctagctacttgggaggctgaggcaggagaaactctggaacctgggaggcggaggttgcagtgatccgagatcgcaccactgcactccagcctgggagacagagtgagactccatctcaaacaaacaaaaacacagagagagagagagagagagagattatgactgtcttggtaccagcagatgttgctttgtaatcaccaagtggggagagggggtggcagcctgtcttacacacctggaccacattgcccaacaacactgctccacccagtccgtaaaacctccctcggtggctatcttcacctaacatagacacctattcaaagcatctgatgaggtcatgtgcgtgctaccacttgggaaaacgaaactaagagcactataggaacaatgatgaatatcatcatcatcatcatatttacaaaatgcttgcatatcacacctgtaatcccagcactttgggaggctgaggcggcgaatcacctgaggtcgggagttcgagaccagcctgaccaacatggagaaaccccttgtctattaaaaatacaaaattagccaggcatggtggcaggcacctgtaatcctagctacttgggaggctgaggcaggagaatcgcttaaacccaggaggtggaggttgtggtgagctgagatcacgccattttgcactccagcctgggcaacaagagcaaaactctgtctcaaaaaaaaaaaaaaaatgcttgtgtaagtatttattatgttaatacaaaatatttatcatcaaaaaataaacaatacatttgattgaaccatcttgtatcatccttcttcttagtggaagacattgcatagacactgtatctcttatatttctcctgataatactacaagattgatccttgtccaacagatatttcctgaacacctactatgtgctgcaagtactgagatccacagtgcaatccggcagccagggagcacccccgatcacagacactgtggccccgcaatggatgggcgcttccattgctggagctcacttttcctgctctgtaagtactgagatccacagtgcaatccggcagccagggagcacccccgatcacggacactgtggccccgcagtggacgggcgcttccgtcgctggagctcacttttcctgctctattgttgtcatagaagaaagttccatacccaacatcacattctctacttatttgtttgtctctcttttcctctagaactgcaggagctgggaatttgaactgtttctctcacttctggatcccagcatttagaacagggctccactcacagcagccactattgctgaagaagcaaatcccgcgggattgcttgaggtcattggacttcacaagagatgtctggggtggagacaggacttgggaagatgctggttcatggatggtgtgggggctgcaggaggagatgcctggggagagagtatctagtaagaagtgacaatgttggttgggcacgatggctcatgcttgcaatcctagcactctgggaggccaaggtgagaggatcacctgaggttaggagtttgagaccagcctggccaacatggtataaccccgtctctactaaaagtacaaaaattagccaggcgtggtggtgggcgcctgtaatcccagctacttgggaggctgaggcaggagaattgcttgaacctgggaggcggaggttgcagtgagccgagatcatgccactgcactccagcctgggcgacaaagtgaaactccatcacaaaaaaaaaaaaaaaaaaaaaagaagtgacaatgtccttgggtctgccttggtgccgcaggggagtgtggtcataggtcgaagacagagaaagagccattaagaaatgggagtaggctgggcgcagtggctcatacctgtaatcccagcactttgggaggctgaggtgggtggatcacctgaggtcaggagtttgagatcagcctgaccaatatggtgaaactctgtctctactaaacatacacaaaattagctgggcatggtggcgcatgcctataatcccagctactcaggaggctgaggcaggagaatcacttgaacccaggaggcagaggttgcagtgagctgagatggcgccattgcactccagcctgggggacagagcaagactccgtctcaaaaaaaaaaagaaatgggagtagcccaaaggggtgagtgatggttacctgagggctctctctggaaagcaggacttatccacactccttagtatcttgatgctgctgagagatcaacgtcagggctgggaaaagggctgttggatttgagagaagggatgagagtcatgaagcacactggggggccgcttccagggacaggagacatcaatggaggggaaatgagaaataagtggacctgcaccttttgctaagggaggctgttaagggaggagagagaccgggcagttgctagacggatggtggccaagggagggttttgtttttgttttaaagatgggagagattataagtgctgaagggaaggatgtaattcaaaaggaaagcttgcatattcatgggggatcaggagtaaggaaggttctgaggtggcaggcagggctaggaggcggcgggattggtttttggagggacatccgttaacaggaggagagaagctggggaccaggagcaaagcccaaggccttcccaggccctggaaaccctccgtgctgggccggtcccctgctgcttctctggtttcacttcctttctcagccctgttcccacttctgctctggccccctggctccctggcttttccctgagtcctcccaccaggctcctgcctttgcctcactttcctctctccctaggatatttttgctgcagagatccacgtggctcagtccctcgctttatctgggtctctgctctcctgtccatttttcagagctcttccctgactaccacataggtaacggtatcctcctattaccttccattcagaccctctcctttaccatagggcctttgcacctgctattctccctgcctgaaatactgtgccttgcctgattattattattattattattattttgagacagagtctcactctgtcacccaggctggagtgcaatagcacgatctcagctcactgcaacctccacctgctgggttcaagtgagcaagcatggctaatttttgtatttttagtagagatggggtttcaccatgttggccaggctggtctcgaactcctgacctcaagtaatcaacctgcttcagcctcccaaagtgctgggattacagacatctgccaccacacccccggcccctgattttttgtttgtttttttgagacagactctccttctgctgtctaggctggagtacagtggagcgatcttagctcactgcaacctctgcctcccgggttcaagtgattctcctgcctcagtctcctaagtagttgagattacaggtgtccgccaccatgcctggctaatttttgtatttttagtagagacagggtttcaccatgttggacatggctggtcttgaactcctgaccacaggtgagctgcctgccttggcctccgaaagttctgggattacaggcataagccactgcgcctggcctgatttttttttttttttttttttttttttttttgtagagatggggtcttgctttgttgcgtaggctggtctcgaactcctgggctgaagctatcctcccgcctcagcctcccaaaatgctgggattacgggaatgagtcaccaagactggccccttccctgatcttgttaatgactcaatcttcacccctagctcaggcatctgtcttcagtcttgtctcttctttctccccaactaggtcaggttccctcacacaggacccttggagagctgggcacttctccaatagcatttgttgaagttactattttttatctgtgagattggctaagacctctttcttgctccagactacaggtaccatccaagcagaggccacatccatcttacccaaatgtgtattttcagtgcctgctggagtgccaggcacccagcgggtacccagaacttagggtgttgggtgtactcatggatcagaacttcatttcagcccgagctgtagacctgaagactgaggctcaagatattccatcatcagatatcgagggtcggagggtaaaaaaaagaaaaagagccaggcgcagtggctcccgcctgtagtcccggcactttgggaggccgaggcaggcagatcacttgaggtcaggagttccagaccagcctggacaacactgtgaaaccccgtctttcccgaaaatacagaaaagtcccagctactcaagtggctgaggcaggataattgcttgaacctgggaggtggaggttgcagtgagccgagattgtgccactgcactccagtctgggtgacagagtgagactctgtcacgaaagaaagagagaaagaaaaagagagagagagagagagcaagagagagagcaagagagagagagcaagagagcaagagagagagagcaagagagagagagagagatcatcgatactcatttatcaaatactcaaacccgtatctgtctacacatgctattgacctaaactatacttttcaagaatattcttcgctgccaaggctggagtgtagaggcatgatctcatctcactgtaacctctgcctcctgagttcaagcgattctcctgcctcacctccctagtagctgggactacaggcctgcactgccacacccagataatttttgtatttttggtagagatggagttttgtcatgttggtcaggctggtctcaaactcctgaccttaggtgatctgcccgccttggcctcccaaagtgctgggattacaggcatgagccactgcgcctggcttcaagaatattgttcatttacagaggcatagaggttaagagtaccctctgaaattacacagcctggaattgactgctagctctcccctctgcaatctttctggcaccagtcatgttggttcagctccctctgggcctcacttacccatctgtagaatggggataataacacctgcattgtacatctattaggaggatgaatgtgattatcacatgtaaaaggctagagccatgcttgacacacgatacatattcaaattccagtcaagcttctctctttttttttgagacggagtttcgctctgtcgcccaggctggagtgcagtggcacgatctcggctcactgcaagctctgcctcccgggttcaggccattctcctgcctcagccttccgagtagctgggactacaggcgcctgcaaccaagcccggctaatttttttttgtatttttagtagagacggggtttcaccgtgttagccaggatggtctcaatctcctgacctcctgatccgcccgcctcggcctcccaaagtgcagggattacaggcgggagctaccgcgcccggcccagcttctctttttgaatgccaggctttgtgctaaaactcttactggtttttacactgagcccccaaagattatcaacccaaatttcaggacgcatgtgtttttattaatgtctcagaaaagtcagattggaagttgcatgcacaattcctgccggaacaaagtacagccatctccctgcactaatgcatttccagctggtggagttcagtttttaaagagcagtaaatacttgcaagagacgaacggcaggaagtgaatgaaggaatagatacatttttaagatccactgacagcttgtacattctggaagccatgtgggtcagggggatgaatttattggctttaacgtcagacgctctgcaggtcgtgagatgtgccttttgtcctgacgtcagctgagagcagatctttggaaggatttgcccattgagcacatttgctgaaacatcttggcttcattacatttatgagttttaaaagcatgtaaaatattttatgtggttcttgcaaaagggtaacaacataaataacctgcagggataggatgattttcaagaaatggggtcagccggcaagccagtgttcactctgtggacattctgagtgtacagaatattaatacttcatttgcccctccagatccactctccattttctcttccctcctctgtgcccaagaggccgggcagtggggaccacatctcctggttctgtgacatctggtttcttgctgggttcagccaataaggaggagtgggagatgggagggccaaggtggggctgggctattaactccctggctggccatggtctggcagtggctgtgtccctctactgaaacccacagctcccatggggtggcctttttcctatggatcttgccattttctgataaccactccctcctgctgcctttggaggccttggagagggaagggcttttggttgttggtagccccggggtgcttcatcaaccctgctgatttctctataccttgcttatatcttggtaaataccccttttattaaacattcctcagccggacatggtggcatgtgcctgtagtcccagcactttgagaggccgaggcaggaggatctcttgaacctgggaggcggaggttgcagtgagccaagattgcgcctctgcactctagactgggcgacagagtgagactgtctctaaaaaaaaaaaacaaagaaccccaaaagactctcctcagttactctgctcaagtgagccttttaattatcttggggaccttgtataggtacagttattattttgtttgtttgtctgttttgagacagagtctcactctgttgccgaggctggagcgcagtggtacagtcttggctcactgcaacctccacctcctgggttcaagcaattctcctgccttcgcctcccaagtagctgggattacaggcatgcacccccaagcccggctaatttttgtatttttggtagagacggggtttcaccatgttggccaggctggtctcaaactcctgacctcaagtgatcctccgccttggcctcccaaagtgctgggattgtaggtgtgagccatcacgcccaacgggcacagttgttaatatcatgttagattaaaaatcaaaatcttacagaaacttcagcctttatatcacgatggcttcctgtccctatggcaaggtaatccttaagagagaggccaagctcaaagctgtagccaaataatttaatatctatgaggtgactttcacatacctcatactaaatatgcaagctacacatgacctctaccatccagaaatacctgttttagcagcgaagatagactatctgatgagaaatcgtactatgggaggaacatggcttggcaattaagagtctctatttgttttctggggctgctgtaacagagagccacagacggagcggcttacacagcacagatgtattgtctgaaggctctctgggtgctgtgagggaaggatctgtgccaggcctctctccttggctcgtagatgaccgtcttctccctgtgactctgccgtcatcttccctctatgtctgtctgtctctgtgtccacatttctcccacaggtcaccagtcctattggaatagggtcttggtaaagaccctatttccaagtagaaacacattctgaggtgctgggtctcagagctccaacatctcctttttgggaggatacaattcaacgcagagcagaggccgacatccatgagtttaaatccaggttgtgtcaccttgggcaaattatttatttatttatttattcatttttgagacggagtctcactctgtcacccaggctggagggcaatggcgtgatctcagctcactgcaacctctgcctcccgggttcaagtgattctcctgcctcagcctcctgagtagctgggattacaggcacccgccaccacacctggctaatttttgtattttttagtggagacggggtttcaccatgttgaccagactggtctcgaactcctgacctcaggtgatctgcccgcctcagcttcccaaagtgctgggattacaggcgtgaaccaccatgcccggccaccttgggcaaattatttaaactgctcagtgtttgtgtttcatcatctagaaaatggggatagcctgggcttggtggctcgcacatgtaatccagcaccttgggaggcagaggcaggagaatcacttgaacccaggaggcagaagttgcagtgagctgagattgggccactatactccagcctgggctacagagcgagactccatctcaaaaaaaaagccaggcatggtggtatgtgcctgtagttccagctacttaggaggctgaggctggaggattgcttgagcctgtgtggtcaagctgcagtgagctgtgatggtgccactacactccagcctgggcaacagagcaagacctatctaaaatataaagtaaaataaaatagggataatatttttacaatcactttgcaggatactgtgaaataaggggtgggagactgcttaaaaagtgcctggcataggcagggcgcggtggctcatgcctgtggctcatgcctgtaatcccagcactttgggaggctgaggcgggtggatcatgaggtcaggagatagagaccatcctggctaacacagtgaaaccccgtctctactaaaaatacaaaaaattagctgggcgtggtggtgggcacctgtagtcccagctactcgggagactgaagcaggagaatggcatgaaccctggaggcggagcttgcagtgagccgagactgcgccactgcactccagactgggcgacagagtgtcaaacaaacacaaaaacgtgcctggcgtgtggcaaatgttgtcggtgtgggctttcgctattattaacctaaagtgttgtactttcacataacaactccattgagcgtcttcaggcatctcaaacttccccgtccagttggctcgttttctaatcctacccatcttggaaaatggcaccctcaccagcccagttgctcaagctgtccatgatccttctcatcattgccactttcactccaccagtgaacctgctggatacccctccaaggacacgctgtattctgaattcattgcttctcttcatctcattagttagatctgatgagacggccctgccgtcctctcttggacactctcttgaacaaagcagtaacctcttagcttgttttcccgctttcactgcaccccttctagagatcatcctctgtacaggagccaagggatctttaaaaacatggatcccagccgggcatggtggctcacgtctgcaatcccagcactttgggaggccgaggagggcagatctcttaaggtcaggagttcgagaccagcctggccaatatggtgaaaccctgtctctactaaaaatataaaaattagccaagtgtggtggcgggcgcctatagtctcagctacttgggaggctgaggcaggagaatcgcttgaacctgggaggctgaggttgcagcaagcagagatcacaccattgcactccagcctgggcaacagagcgagactccgtctcaaaaacaaacaaacaaacaaacaaaaacaaaacacggatcccatcatgtcttttcctgcgtaagactctggatggctttccattgaaactagaacaaaatctacacatctttgttctaaggccctcttccaaggccctaatgatctggtctctgcctgcctctccaatgtgacttcctaccattctcccctggatcactagattttagttacatgggtcttcctgcttttcctccaatataacaagcagatccagcttcagtgcctgtgcacttgctgttctccgggcttggaatacccttccaagaactttctccctcacttcattcaggtctttgctcaaatgttacctcttcaaggaggtcttccttgcccaccatttttttttgtttgtttgtttgttttcttttctttttttttttttttgagacagagtcttgctctgtcacctaggctggagtgcagtgatgcgatctcggcccactgcaacctctgcctcccaggttcaagcaattcctgtgcctcagcctcccgagcagctggaacgacaggagacacaagccaccatgcccagctaacttttgtgtttttagtagagacagggttttgccatgttgtccactctggtctcaaactcctgaactcaagcaatctgctcacctcagcctcctaaattgctgggattataggcatgagccaccatgcctggccgagattccctatttctttttttttttttttttttttgagatggactcttgctctgttgctcaggctggagtgcagtggtgcgatcttagctcactccaacctccacctcccgggttcaagcgattctcctgcctcagccccctgagtagctgggactataagcgcatgccaccacacccggctaatttttgtatttttagtagagatggggtttcaccatgttggccaggatggtctcggtctcctgaccttgtgatccacctgccttggcctcccaaagtgctgggatcacaggcgtgagccactgcacccggccagctcttaattgcattattttatattaccattctcacagcattaatcaccctcagcagttctatttacgcacttctttgttttgcttacggtccacctctaccaccagaatgcaattgatctgatagttgagaggtctcccatgctcactgctgaatccccatcacctagaacagtgcctggcacttaataggcatccagtaaatctttgcgggggtgggatgggaagcaaacacaaaatgatatgtggttctcttctctcttttctgccccctctccaaacgaaaccaccagcagaggaaagaaacaaaaagtctatgagttgtcaagatttctgctttggggcacagtggtcatgcctgtgatcccagctttttgggaggctgagttgggatgatcatctgagcctagttgtttgagaccagcctgggcaacatagcaagactccatctctaaacaaatttttttttttttttgagacaaggtcttgctctgccacctgcattggagtgcagtggcactatcatagttcactgcaccctcaacctccaaggctcaagtgatcctctcaccttagcctcccaagtagcttggactacaggcgtgcactaccacacctggctaatttttttgtagtgacgaggtttcgccatattaaccagactggtcttgaactcctggcctcaagtgatccttccttcttggcttcccaaagtgctgagattataggtgtgaaccaccatacctgattctacaaaaatttttttaaaaagttagccaggcatggtggcgcatgcctgtagttccagcgaggtgaggtgggagcattgcttgagcccaggagttggaaactgcagtgagctttgatcctgccactgtctgggcaacagcatgagactctgtttctagaaaaacaaaacaaaacaaaacaaaaaaagattcccgctttggaacaatggctaggggctgggaatctaggatggatccagagtgggcaagtcttggcttcttataactgcagaatcccacgatggatgtgtgggtgggctggggtaacagatctactcagggtgggggctgggggtatcgcgaggtgtttaagcctgtcaataaaaaaagtgaccgctgctttgtatctgcagctactcaagggaaataaagccgtttgcttataaagaatttccataaacatttctgaggatgtgtattaggggtaatcttgggatgtgcattaaactaaacagggtagtataaacacaggaacaggctgaaagggggagaataaatggcccaggtttgccctggcccaatggccttaggcaacttgtgcagcctgcagaaacccagagacttcagttcattatttaaagaaggcggagacaaagagggaaaaccaaacgcagccctcccatgggtagatagattcttgaacaacctctggaattaagctttttttttctctcctcctagtgttcaatgctttggattcctgaagttatctatgttgaaatactcgagagatggtaaggagaacaggaacaggtagctttgggaggcacgtgctctgggctaggcatagttcttttttttgggggggcggggggagggagtctcgctctgtcgcccaggctggagtgcagtggcgcgatctcggctcaccgcaacctccacctcccgggttcaagcgattctccctcctcagcctccagagtagctgggattacaggcacctgccaccacgcccagctaattttttgtatttttaatagagactgggtttcactgtgttagccaggatggtctcgatctcctgacctcgtgacccacctgcctcggcctcccaaagtgctgggattacaggcgtgagccactgtgcccggctggctaggcacagttctaaaagctgcgtgtgcacgatctcatttcatcctcccggtaccgctttggggaaggtaacactattgcctccactttgcagaagaggaaactgaggcagagagaagggtgatgacttgctgaaggatacagagctcattacagtggaggttcagggtctgagctctagaaaagatgctccaccctatgaaggaaaaggttcattggtattatctatctatctatctatctatctatctatctatctatctatatatttttttctgggatggagtctcactctgttgcccaggctggagtgcagtggtgcgatctcagctcactgcaaactctgcctcccgggtttaagctattctcctgcctcagcctcctgagtagctgggattacaggtgtgtgccaccacacctggctaatttttgtatttttagtagagacggggtttcaccatgttggccaggctggtctcaaactcctgacctcaggtgatctgcccgccttggcctcccaaagtgctgggattacaggcgtgagccaccacgcccggcctaaatcatttgaatttgctaactcattcatgtgttgataatataaataaataatttttaaagtgtccccttgtgcaaaccaatgatgaaagcaggccatgaatagaggcaggtgatcagctccactctgtgccccggagtaccctcaaaataaaccccaaggctcaggaccaaatatagatgatgataggctaggcggtggctcacacacaaaaaatcagaggtggataagaatctatatctgcacctgccaggagccaggtcgaggaggattaagagttgggggagactttccactgtgcccattctttctacattttgggtcatatgaatgtattatcttttccaaagtttgaattattatttttgttttgtttgttttgtttttttgaggcggagtttcactcttgttgcccaagctggagtgctatggcacgatctcggctcacctcaacctccgtctcccaggttcaagcaattctcctgcctcagcctcccaaagtgctgggattacaggtgtcagtcaccgcgctcggcctgaattattttttaaaaactttgataggatataaatgaaaagaatttttttttttgagacggagtcttactctgtcacccagcctgaagtgcagtggtgcgatcttggttcactgcaagctccgcctctcgggttcacgccattctcctgtctcagcctcccaagtagctgggactacaggcacccaccaccatgcctggctaattatttgtatttttagtagagatggggtttcaccatgttagccaggatgctcttgatctcctgacctcgtgatccgtctgcctcggcctcccaaagtgctgagattacaggcgtgagccaccgcgcccggccaaaattttttttaatatgatacaaaataattttttttttttttttttgagacagagtcttgctctgtcgcccaggctggagtgcagtggcacgatctcggctcactgcaagctccgcctcccgggttcatgccattctcctgcctcagcctcctgagtagctgggactacaggcgccctccaccccgcccagctaattttttgtatttttttagtagagacggggtttcaccatgttagccaggatggtctcaatctcctgacctcgtgatccgcccacctcggcctcccaaagtgctgggattacaggcgtgagccaccgcgcccggactaatatttttttttaaataaaaaatatgaaactggcctgggcacggtggctcatgcctgtaatcccagcactttgaggggccgaggtgggtggattacctgaggtcaggagttcaagaccagcctgaccaacatggtgaaaccctgtctcttctaaaaatacaaaattagttgggcgtggtggcgcatgcctgtaatcccagctatttgggaggctgaggaaggagaatcacttgaacccaggatctggaggttgcagtgagccgagatcacgccattgcactccagcctaagcaatgaagagtgaaactctgtctcaaaaaaaaaaaaaacaaaaaacaaacaaaacaaaacaaaaaactgaaaaggtttcaggaatgcaaaggcaacatgtcccaaagtattaaaatggtacaaccttgcttttgacgtgaaggtcagttacagaacgaaattagccagcaagcaggtgagagcagagattaaaacggtaatgaagatggccattccacagccttttctaactacatggaaattatcttccttgacagtagccaacctgtgcttacattctctctctctctctctctctctctctttctctctctctcctcccacctgcttgccatgacctatttcatagtcctggcacgtgtgaaatgcctgccaagaactgcagaagacagagacacagtgctccaaaaaggttgaatggcaactttatcatggacattttggtgattacaatatctacatttcctggggggtctcagaatcacagaaattatttcaagttagtccgaggctgctcaacgctgaggtcaaaacatctgagagaaaaggttaagtaaaaaatctggttgtttctataaaactggactcattcattcaatggctatgtactgaatacctaccatgtaccagaccacgctgaggaccagccagaggcaaggcaggcacctcaggcacaaaaggcaagaaggcctcactctctgtcactgctacacctgcaaaacccctagcgtaaggttccctttgcatttcctgcccgtggtgcctgcctggcctcatcctagtgcctattccataccagacgctgttctaagcactgacgctgcagcagtgaacaaaacaaaaagaagctggacaaatgctcaagtctccacatttcagaattggatattttggtgctgaattgactgcgttaagaaacagaggtttcccggatacagtggctcatgtgtgtaatcccagcactatgagaggctgaggcgagaggatggcttgagcccaggagttttgagaccaacctggacaacacggtgaaatcccagctttacaaaaaatatgaaaattagctgggcatggtggtacacgcctgtagtcccagctactcggaaggctgaggtgggaggatcacctgagtctgaggaggttgaggctgcagtgagttgagattgtgccactgcactccgcctgggcaacagagtgagactctgtctcaaaaaaaagaaacaggtcaggcgcggtggctcacgcctgtaatcccagcactttgggaggctgaggcgggtggatcacctgaggtcaggagttcgagaccagcctgaccaacatattgaaaccccgtctctactaaaaatacaaaaattagccaggcgtggtggcacacgcctgtaatcccagctacttgggaggctgaggaaggagaatcacttgaacctgggaagcggaggttgcagtgagctgggatcatgccactacactccagcctgggcaacaagagcgaaactccatctcggaaaaaaaaaaaaaaaaaaaagaaacagaggtctttgcccactcttcagcttggagttactaagtgatctcagtcttgcttcagttgacttcttactctgcatccccaggtagccctttgttgttcaggactagcttggacaatggaaagccccatcttctgagtgctccccaatgtctggggctatagatagattgaccaatgcaatctatgtcatgccccatgaggtgggaccagtgattctcaccactttccaaactgaggtcacagttggtctgaaagctgggagggttcacccatagagaaaactggccaagacaagattcagatctggcgtgggtccgagagactcctgcaagggtgtactctagcactccacacattacttaaggttggttgagctcagaggtacagatatatgttggcgacttactgaaggctgcaaagctcattaagatcaggggtccagggtctgagctcttcaaaagatgttccaccctaggaaggaaaacgctcgttgttatcatcattgacgtttggtcactgagccttggggtttatttttaggaaactcctaaaaataatgtgttttaggacacacagtgaaactgatcatgtgtctccattcatggcctgctttcatcattggtttgtgcatgaagacacttctaaaattatttattcatattatcgatatatagatgtattagccattgcttctccctgtcacgtataagacttgacaagactatcatccccgaggtgacccccgaagtgctatcattactcaccgtcctaccctctggcccagctgcaaagaatgggtctagcttagctttctgatcctttctgccatcccaacccaatctgctctgattcatcacttcctccctaagcatcctcaccaaagcccttcagcaccagtgtcagcaacaacagccaatatgccctgggtcttccttcctgtgctctttcaaataaccagattattactggactgcctattatatgccaggccctgtgattggcactggaatgcaacaataagcaaaaacagacatggtacctacccatcttcatttagcacacagtctagtggagggaggtggacatcagttaaataatcacccccaagtacgcagaaagatcttattgcacagtatgataatggatatggagaaaaagtgccaggcaccgccaccaggagttggaactggtccaggagggcttctctgaggaagggaccttggagctgaaacctgtaggatggggcaactgggtaaagtgggcagagatagcctctgggcagagggttgagcagtgacactggagaggaagccagaggctcacttgggaaagaccttgagatggatcagaggcaggtgatggcgggcatccatggggtcttactctgagcattcatgggattcagtttgggtgcaatgcagtcgcggccggctacagttgcagaactcactggagggaggtgagagtgcatgggaagaccagtgaggaagctcctgcccgtctacaggtgatggacgatcgggatagtggggtggtagcaaggtgcaaacaaatggactcatgatgtacttggagatttggtgatggagtgcatgagggataaggagcagagtgaggggtccctgacctcctgctcgagcaaatagagcaacagtagatcctcaggtgatcttcataaattcaaaccatccttccctcccttgcacaggcaagaaacaacattgaagtatctacattgaagacagaactttgtgttcctatttgtttttctctatgctaattaaaatgccctttgtaatggccgggcatggtggctcacacctgtaatcccagcactttgggaggccgaggcaggcagatcacctgaggtcaggagtttgagaccagcctgaccaatatgatgaaaccccgtctctactgaaaatacaaaaattggccgggcacggtggctcacgcctgtaatcccagcactttggggggctgaggcgggtggatcacctgaggtcaggagttcaggaccagcctggccaacatggtgaaaccccatctctactaaaaatacaaaaaaattagccagtcgtggtggcaggcgcctgaaatcccagctactgggtgggtggggggctgaggcaggagaattgcttgaacccggaaaggggaggttgcagtgagccgagattgcgccattgcactccagcttgggggacaaaagcaagaagctgtctcaaaaaaaaaaaaagtacaaaaattacccgggcatggtggcatgtgcctgtaatcccagctactcgggaggctgagacaggagaattgcttgaacccgggaggcagaagttgcagtgagcccagatcgtgccattgcactccagcctgggcgacaagaaagaaactctgtctcaaaaatatatacataaaaacaaaacgaaacaccctttgtaaatcaatccagaggaaacttttcctttttttgccaatgaaattaattatgtcgagaaacctgaatctcatctcttctgtcttcatgtctgttacattctcaaaagacacactattgctcagtgtcagggtaggataatgagctgatcagaaacaattttcatgtcatttgaagcttaatttcattagcaaataaaaactgtttcaaataccaccattggtcctctaaagttgatttagagattcaggttgaaaatcgattaaagtgatttttccttcataaaagtttatagctctgcaggcacacacagactccttagacttgcaaagccacatccatattattttccagaatgaccgttaccgaaaaaaagtgagttgcagagcaataagtagatatgatctcgtttatgtaaaaacaaaacaaagcagtgacaaaagctaaaactgaaaatcactccaaattcagcagcattggcatcacagtggagcttgctaaaaatggggaatctcgcccgggcgcagtggctcacgcctgtaaatcccagcactttgagaggccgaggcgcgtggatcatgaggtcaggagatcaagaccgtcctggctaacacggtgaaaccccgtctctactaaaaatacaaaaaattagccgggcgtggtggcgggtgcctgcagtcccagctactcgggaggctgaggcaggagaatggcgtgaacccgggaggcggagcttgcggtgagccgagatcgtgcccctgcactccagcctgggcgacagcgagactccatctcaaaaaaaaaaaaaaaaaaaagaaatggggaatctcagatcctacccaagacccactgaatcattttaacaaaatcaacagctgattcttcagcacattgaagtctgacaagcactgctgttaacagttctttttcttttcttttctttttaagacaggttctcactctgtcacccaggctggagatcacagtccaccacagcctcctgggctcacgcaatcctcccgtctcagcctcccaagcagctgggactgtaggtgcatgctatcatacccagctaatttttttctttcttttcttcctttttatttttatttttatttattttttattttttctagatacaaggtctcactatatggcccaggctggtctcaaactcctggactcaagcaatccttccacctcagcctcccaaagggctgggattataggcgtgagccaccacacccagtctatatttatatttctacacacacacaaacacttgtgtgtgttatatatgtagataaatatattatctatgtatctaatatatctattatcctagacatacatagatatgtgtatatgaatagaaatataaatgcatagaaaagtctggactaaactgctcacggtggttaattttgagaagtttggatttcaaggtgaatgtggtggtgaatagtaagtgggaaattcaaagggggctttcacattttaccagatataccagataacctagatttactgatctaggcgcccgccaccacgcctggctaattttttttgtatttttcagtagagacggggtttcaccgtgtttgccaggatggtctccatctcctaacctcatgatctgcccgcgtctgcctcccaaagtgctgggattacaggtgtgagccaccgcgcccggccagacagaactgcttaatgcattacttgggtaatttaaatttaaatattaagatagtataaagctgaggacctaaaaaactaatcttacaaataacacggacatctcaagtccctcctctctttgacctaccaattcctcctggggggaggtgccctcagaattactcacacatgtgagaaatgatgtgcaaccgagataattcacaggagcactgtttgtaatagcccaatattgaagacaacttaaaggcccatcatagcccgggcacggtggctcacgcctgtaatcccagcactttgggaggcccaggcaggcggatcacttgaggtcaggagtttgataccagcctggccaacatggtgaaaccccgtctctactaaagacacaaaaagtagctgggtgtggtagcgcgtgcctgtaatcccagctacttgggaggctgagagaggagaatcgcttgaacctgggaggtggaggttgcagtgatccaagatcgcatcacagcactccagcctgggtgacagagaaagactgtctcaaaaacaataaaggcccatcatttgggaattggttaaatagaataaaggacatttacagcgtaacactatacagtcatagaaaagagagatcaaagggctgggcgtggtggctcgtgcctgtaatcccagcactttgggacgctgaggtgggaggatcacctgaggtcaggagtttgagaccagcctggccaacatggtgaaaccctgtctctactaaaaacacaaaaattagccgggggtggtggcacacatctgtaatcccagctactcaggaggctgactcaggagaatcacttaaacctgggagatggaggttgcagtgagccgagatcgcgccactgcactccagcctgggtgacagagcgatactcttgtttcaaaaaaaaaaaaaaaaaaaaaacaagatcaagctctatatgtgttgagatggaacaatggccaagagcaatggttcatgcaaggacaaaggggctgagccatctggatgatatgttgacaattgtgtagaaagggagcggggagtggaatacatatttatatttggttgtatatgcacaatgtagctctgagtatcatattatacaacataaaggagtagtggttgactatgagaaggggaacaaatgggtggctgtgggacagtggttaagagacttttcaccatttgttaaacttggtgattatttgaagcacttggatgcattacctattcaaaatcttactaaaacaagaacaaaacaaacaaacagaagcttctaggattcttttatttctctgagaatccttactcctgggaactacatctggagaactcattgtgagcccaataacacaggggcttggtttcccatgaaaagaaggctgcctttcaaggaaggagagggacattctccatcctgaggggacaccccccacacaccccatgcttcctttattgccatttcgtcctttgctgctctcatttgatgtggctcggcttttttttttttcttaaagttcccaccagttctctttaaagacagcaccaaaactaaaactaaaaaccaatttaattttacttttaaagcactccccctttttttttaatttttacaataatgaagatcttattctaggatgaaaataatgaataggaaagagctgtttattcttccttcttcccacccctgaatattgaagtaaaactaaataacaatgaaagtgactaggaacagcagacaaggggaaatatgtcagaatgagaacatctcatgtcatctccagggctgggggagaaacatctttcctggtacaaggtcccggtaccgaagaaatacaatttttcaaaaagttctgtaagtgatacatgcttgttacaaaaaatctctaccattttcaaagcttagaaggcagaaactccttgttagttggtaatttctttatctctctcatgctttcctgatatctgaattacgcttgagaaaaagaggaaaataaaacaagacagaaaataatgcttccttaggtaaatacaatcggctaagaaaggcttccaagaagaagcataattcactgagtcccagcttattgagagaatccccaaacaaaggacttttgtgaagggatcagtctcagccaccataacttagcatacaataggatggcttaataaaagaggtttccaaaggccaagatggttatcaaagatctcccaaggagagagggagaagaagagacagagagaaaaagagagagagaaagagggaaggaataaccttctggaatgttcccaactatctttccagttagcattcatgaatacgtgaaaggtttcatatcacttggagtcccacccatttttcaaaataggaagcttccgctattttcttctggatccgttattgggtcaagagaagtctctgcctcttgtccaggacatttggatatttcttatttgttatttatttatgagatagggtctcactgtgtcgcccaggctggagtgtagtggcacaaccatggctcactgcagcctcgacctcccaggttcaagtgattctcccgtcccagcctcctgagtagctaggacgacaggcaccattgcacttggctaattttaaaatattttttagagatagggtcttgctatgttgcccagcctgctctcaaactcctggcctcaagtgatcctcccccaccttggcttcccaaagtgctcggattgcaggtgtaagccacccactgcacctggcctagatttggaagtttatataattacttttcaatgaatgttttaatgaatgttgcaatgaatgtctccttgtttaccttagatgactgggtgaaataaacaactcctcaaattttgttatgttactctgccatattatatcacgtatgacatatattgttatattatattacatatgtatgtctatacatatgtttctgtgtatgtagatgtttatacatccagcatattaaatccatcaagcttttcgacaaaggtgaaaggttgtagacttcacaaacttaaataatgtaggttgtagagtcagagcaacttctggttgtcccagtgaacttggataagtgacttaacctggctgggcctccatgtcctcctggcaagtaggggtggtaaccgcccatatggagggggttccacaagataaatttggaaagacataggcaagtggcacaaagcaacggtagctgtggttgtcccctccggacagtggttattaaaaagacttataggttgggcgcggtggctcctgcctataatcccagcactttgggaggccaaagcaggcagatcacttgaggtcaggagatccagatcagcccagccaacatggtgaaaccccgtctctactagaaatacaaaaattactgagtatggtggcgcaagcctgtagtcccaacctactcaggaggctgaggcatgagaatcacttgaacctgggaggcagaggttgcagtgggccaagatggcgccactgtactccaccctggcaacagagtgagaccttgtttcaaaaaaaaaaaaaaaaaaaaaaaagaagatgtatgttcccggctttaggagactaccttgggggctgtgcaaacacaggctactctattcaaattctggatttctttaaaaaacaaaaccacaaacaccaaaatactctgatagtgcttcaaaacctcaaactggccagtgtgtggctcatgcctgtaatctagcactcgtgtgtggctcatgcctgtaatctagcactctgggaggctgaggcaggtggattgcttgagcccagaagtttgagaccagcctgggccacatggtgaaaccccatctctacaaaaatgataaaagttagccaggcgtggtgactgtgggcctgtagtcccagctactcaggaggctgaggtggatcaccagagcccaggaggtcaaggctgcagtaagccgagatcatgagatcatgccactgcacaccagcttgggtgacagaatgagaccctgtctcaaaaaaaaaaaaaaaaaaaagccctgaaattcagtggtctcaaaatttagagtatattcagctattcagcaaaaaagagaaaagaataaaattcttacttgaggccgggcatggtggctcacgcctgtaatcccaacactttgggaggccgaggtaggtggatcacttgaggtcaggaattcgagactagcctgaccaacattgtaaaaccccatatctactaaaactacaaacttagccaggaatggtggcacatgcctgtaatcccagctacttgggaggctgaggcaggagaatcgcttgaacccaggaggcagaggttgcagtgagctgagatagcgccactgcactacagcctgggtgacagagtgtgtgaaactccatctcaaaaaaaaaaaaaaaaagattatggtgagcattgcaatgactgtgcgcacactaaagaccactgaattggtcactttcgataggtaaattgagtatgaagtatatctcattaaagctgttatgaaacacattttaaggccgggcgtggtggctcacgcctgtaatcccagcactttgggaggctgagggatcacctgaggtcgggagttccagaccagcctgaccaacatggagaaatacaaaattaccccggggtggtggcacatgcctgtaatcccagctactcgggaggctgaggcaggagaatcacttgaaaccgggaggcgaaggttaccgtgagccgagatcgtgccattgcactctagcctgggcaacaagagcgagactccgtctcaaaaaaaaaaaaaaaaaaaaaagtaagaaacacattttagtgcactttcatatgccctgggcacgcttgtttaaaatgtaggctggtacactttcttccagggattttgcttggagagaccattcttatgccaccaggggcctttcaaagctttgagaaacaccgcaggaggcctgacccaagtcttatccaccatctagacatccactgtgcctgatgttccatcctgaacaccttgttttgtccatcctttctgaaattttatgtccaggttgctatcattgctttattttacaggggaggaaatggaagtggtataaaacaaaacagcgaagctcagggctgtggcttcagcgggcctggaaatgggtagatggggactataggtcaagtgtgttctcctgcagcccacacctgatcactgcagttctttttttttttttttttgagacacagcctcgctttgtcacccatgctggagcgcagtggtgtgatctcggctcactgcaagctccgcctcccaggttcacatgccattctcctgcctcagcctcccgagtagctgggactacgggcacccaccaccatgccaggctaatttttttgtatttttagtagagacagggtttcaccgtgttagccaggatggtctcgatctcctgacctcgtgatccgcctgtctcaggctcccaaagtgctgggattacaggcgtgagccaccgcggccggcctggtcactgcagttctagcggcacctaggaatgtggttaacacaggcttttcttgctgtggtgggccttactatatacgacacctaatatagtaaaatacgaccatatttcacattcagttaaacaaatgtgtgtaatttttgaaatgttctgaagtgtgcaattactaattttgctcagatagaatattttgctcttgtgattttttttttttttgagatggagtctcgctctgtcgcccaggctggagtgcagtggcgcgttctcggctcactgcaacctccgcctcccagattcaagtgattctcctgcctcagcctcccaagtagctgggtttacaggtgtgtgccatcacacctggctaatttttgtatttttagtagggatagggtttcaccatattggccaggctggtctcgaactcctgacctcaggtgatccacccgcctcggcctcccaaagtgctgggattacaggagtgagccaccacacccagcttgctcttgtgatctaaagacctctaaaaaccaccagttgcagatgccagttagtatgatgtaacaatttgtagccatttgtgaattctctgtgtatattttatcacttattaaatttttatttaatttttagagaggaagggtctcactctgtcacacagactagagtgcagtggggtgatcatagttcattgcagtctcaaactcataggctcaggcagcttctcacctctgcctcccaagtaactaggactacaggcatgcaccaccacaccaagctaatttttcaattttttgtagagacagggttttgtcatgttgcgcaggctggcctccaactcctggcctcaagccatcctcctgccttggcctcccaacatgttgggattacaggcatgagccactgcatcagcctctgtctatttttaaatttgttttggtaagccaggatttgatatttttctttggttcttgcaaagctcttgcgtccttggatctagtactgcagcaccctgtaaaaatatccctgaaagtgtaggcaaagtcatgcttggttttgtggtggacgtgatcccacttgttgtctggtttcattcactatttatctcaaagcgcatttctgatttctctacttcattctgtccattgtagcctgaggaggtggaggtggggctctgaagatggctgagaggtggggactgtgtccaggtgtgtctagtaatctgaatatttcttaatcttccactgtatgcaaatactttactgagctacatgataggaagaaatataaaacaaaacccctttagaagattgcaaatgaatactgtagaggaagctagcaggcatgtataagaaaagattcttgacctcaggcattataagaaaaatgcaaatataattagtatatcttttttttccttatcagatcaacagatatccaaccttttgataatgccgtctttgcagggtgtggggaatcaggctctgacatacactgccaagagggtgggagttaaaaatgctttagtctccttgggagtatttggaaacataaactaaaatagaaactatacacgttcctttttttttttcttttgagacagggtctcgctctatcgcccaggctggagtgcagtggcacgatcagctcactgcaaccttcacctcctgggttcaagtgattctcatgcctcaggctccagagtagctggggctacaggcgcgcgccaccatgcccagctaattttttgtgtgtgtgtgtatttttatgagagacggggtttcgccatgttggccaggctggtcttgaactctcaagggatccacctgccttggcgtctcaaagtgctgggattacaagcatgaaccaccatgcctgactgagatgtacatactctttgacctaacaattattctactggaaatttatcctatagacccccactcaggaatatatgataagtgatgtacgtataaggaaatacattgcaacattgtatgtaaaagctaagtaatagaaacaacccaaatgtccattagaggaagctgtcaaaataagttatggtcatctatgatatggcattgtatttctgcagctggaggcagctgtgtttgaactgacattctgtgagagatagactgaaattaaaaacacaagctggggccaggtgcggtggctcacgcctgtaatcccagcatgggaggctgaggtggttggatcaccttgaggtcaggagtttgagaccagcctgaccaacgtggtgaaaccccgtctctactaaaaatataaaaataacccgggcgtggtggcacatgcctgtaatcccagctacttgggaggctgaggcaggagaatagcttgaatccggaaggcagaggttgcagtgagccaagatcatgccattgcactctagcctgggagacaagagtgaagagtgaaactttgtctcaaaaaaagaaagaaaaacacaagctgccagactgttttggatgctaccaactgagtaggaaaaaatattaggttgagccatgtgaaagtaccaatatgagaccatttttgacatataaacatgacagtttcatgtacttcaatgtcatatataggtatgtagggttttttttttttttttttttactttttattttgaagcgaagattcacatttttttttgtttttcttcttctttttttttttttttttttttgagacggagtctcgctctatcgcccaggctggagtgcagtggtgtgacctcagctcactgcaagctctgcctcccgggttcacgccattctcctgcctcagcctcccgagtagctgggactacaggcgcccgccaccacgcctggctaattttttgtacttttagtagagacggggtttcaccgtgttagccaggatggtcttgatctcctgacctcgtgatccacccgcctcagcctcacaaagtgctgggcttacaggtgtgagccacctcgccgtgcccggcctcatgtgtacttttaagaaataatagatactgtgtaaactttacccagttctcctaatggaaacctcttacaaaactttagtacagtatcataaccaggatgttgacattgatatattcaagatacagaacatttccattatcataaagattcctcatgttatacttttatagccacacccacttccctccaggcctaacccctccttcattcctggcaaccactaatctgttctacatttctatagtttcgtcatttcaagaatgttacataaatggagtcatatagtatataatcttttgagatcagctttttctctgtatttatttattttttgagatagggtctcgctctgtcactcagacggcagtacagtggcactatctgggctcactacagcctccgactcctgagctcaatcaatcctcccacctcagcctcctgagtagctggggctataggtgtgtgccaccatgcccggagattttttttttttttttttttttgagacagggtctcattctgtcacccaggctggagtgcagcggtgcgatctcggctcactgcaacctctgcctcccgggttcaagtgattctcctgcctcagcctcccgagtagttgggattacaggcacctgccactatgcctggctaatttttgtatttttagtagagacggggtttcaccatgttggccaggctggtctcaaattcctgacctcaggtgatccgcccatctcagcctcccaaagtgctgggattacaggcgtgagccactgctcccagctgaacacagtttttatttctctgtgataagtgccccggagcgcaactgctgggtcatgtggtactgcatgtttagtttttttttttttaacaaactgacagttttccagagtggctgtaacacgtgacattacctccagaaatgcatgggtgctatgtacagagtggtaaaaaaaaatctctgtcgccaaaccatctgaactctagtgaaagtggggtgggtgtgaacaaatgaacaaaatctacattgtattagacaaggataagtgctttggagagaatgaggcagccagtgggggtggggtctgcaagggtctggatggatcaactgcagtggtgaaaagggaaggctttggagggaaagtgacacctgaagatagaataaatgtgttattgtggaatgcaatgctgctccactgcccccccacacctttttttttcaatgccttgaaaagacttaatccagacgaactctcttctcgcctgctttctttttttttttttgagacagagtttcgctctgtcacccaagctggagtgcagtggcacaatctcagctcactgcaacctctgcctcctgggttcaagtgattatcctgcctcagcctcctgagtaactgggattacaggtgcatgccaccacgctcagctaattttttgtatttttagtagagacagggtttcaccatgttggtcgggctgatcttgaactcctgacctgaagtgatccacccgccttggcctcccaaagtgctgggattacagacatgagccactgtgcctggcttgattttagattcccatctgatgttctctataactttgatgactccccaaacaaaggctcccaaacacactctgaggcttatggtaatgaatttaaataagccagcgtgtgtactgggtgtagcacatgtccagaagcaggaaaccctcactgtcctctataagctgctgttctgtcaggaacattgtgacagcactgctgctgatattatcgttttcatatcccagaatgggaatggtttcttgccatcctcagacagagttgcctcatcttgatgacagtggtaggatgagtaataattatctaccattgtctaacttagatatcaagcactttgcaccaattcttattgggtgctcaaagaaacctcaggaggaatatgctatcagtataactccctttttatagctaaggccacaaaggctctgagtggcgaagtggtccatgagggtctcagagcagtaatggggaagaatgagattttgaatcctaaagcactagaggaaatgttcttcaactatgcctcagaggtgtcctagaaaatcagaccggaagagtattcaccaaatttagtatttgtgctgcaacgattggaaatccataagtaaaagaatgaaagtggacttttccctcacaccatatgcaaaaattaatttgaaatgaatcaataacctaaacagaagagctaaagccataacactcttaggagaaaacacaggaggaaatttccatgaacttggaattggcaatgggttcttagatatgaacacacaaaacatgagcaacaaaataaaaaataaagcacaaggaacaaaaggaaataaattggacttcattaatttcttttcttttttttttttgaggcagagtcttactgctgtctcggctcactacaacctctgttccccaggttcaagcaattctcctgcctcagcctcccaagtagctgagaatacagctgtgcaccaccacacccggtttcaccatgttggccagggtggtctcaaactcctgacctcaagtgattgtcccaccttggcctcccaaagtgctgggattacagaagtgagccaccacacccggccgggacttcattaaatttaaaaacttttgtacatcaaaggacattatcaaggaaggaaaaagacaactcacagaatgggagaaaatattcgcaaatcaatcataaatctgataagggtctgggatctaaattttttttgtagccaccacgcctggctaatttttgtgtttttagtagagatggtgtttcactatgttggccaggctggtcttgaactcctgatctcaggtgatccaaccacttcggcctcccaaagtgctgggattacaggtgtgagccaccactcccagcctgggatctaaaatttgtaaggcattcttgcaaagcaacaacaagacaaacaactcagtcaaaatatgggcaaaggacttgaatagatattttcttccaaagaagatgtacaaaaggccagaaagcacatgacaagatgctcagcatcattagtcactagagaatgcacttcaaaatcacaaggcatcatttcacatccactaggatggttattatcaacaaaaccaaacagaacacaaaaacccaggttgggtatggtggctcatgcctgtaatcccagcactttgggaggccaaggtggttggattacctgaggtcaggagttcgagaccagtctggccaacatggcaaaaccccatctctactaaaactacaaaaattagccaggcatgatggcacacgcctgtaatcccagctactcaggaggctgaggcaggagaatagattgaacccgggaggcggaggttgcagtgagccaagattgctccactgcactcttgcctgtgcgacagtgagactccatctcaaaaacaaacaaacaggccaggcgcggtggctcatgcctataatcccagcactttgggaggtcaaggcaggtggatcacgaggtcagaagattgagatcatcctggcgaacacggtgaaaccccgtctgtactaaaaatacaaaaattagcctggcttggtggtacgcacctctagtcccagctactcaggaggctgaggcaggagaatcacttgaacccaggaggcagtggttatagtgagccgagatcgagatcatgctactgcactccagcctgggtgatacagcaagactccatctcaaaaaaacaaaacaaaacaaaacaaaacaaaacaaaaaaacaaaaaataagaaaacaggcattcaaatacacgtacatacgtgttcagagtagcactatacacaatagccaaaaggtgtaaatatcccaaatgtccatcaactggtgagtgcagaaatgagatgaagtactgtataagttctgttgtaccacagacaattattcagccataaaatggaatgagatactgatacgtgctacaatgtggatgagccttgaaaacattacagtaagtaaaagaagccagacacaaaaagccacatttgattttgttgataagaaataggaatctgaatctgttcactttaaccagaataggtaaggccatggcgagatgccgattggcggttgccaggtcctgggggctagggtagaactggggagcgactgcctactggctacacggtttccacttggggtgatgaaaatgtttcggtgctggacagaggtggtgataacgcaatactgtgaatataccaactgctcctgaattggtcactttaaaatggttaattttatgttatgtgaatttcatgtcaattttttttcttttttcttttttttgagacagagtttcacacttgttgcccaggctggagtgcagtggtgcaatctcggctcaccacaacctccgcctcccgggttcaagcgattttcctgcctcagcctcccgagtagctgggattacaggcgtgcgccaccacgcccagctaattttgtatttttagtagagacagggtttctccatgttggtcaggctggtctcgaactcccgaccttaggtgatctgcccgcctcggcctcccaaagtgctgggattacaggcgtgagccaccgcgcccagcttcatgtcaatttttaaatttcacgtttgattccaggggttgggagtttgctgcccttcatcatggagtttgctgcagccagtgcaggggtgaaaagggaagagcaaaacaggcagatctcgtttaggagagatactgcaatttatctgatgctgatcttttaagtcacttctggtgccaaagagcactggacttggagcctgaagaactgagacttcctgacatttggccttaagcaagcctgagcttagacttcctgagcttttcccgatgttttgtgttgggcagccccatttccctggacagctgcagggatggagggaagtgatgcgtgtatgcatgtgggcttgttccttccttctctattccacaggctgtcagtgtacaggtatgtttgcacacaagaaagatgttggtcctggggtctcagaggcaccaaagaactggccagctttgtccaattcatccaaaatccagtcagtggcgtaaagaggaagccatcacaccaggcctttgccaacaaagcagacaggctgcccagcccaggagctgcctactcttactcgcctgttggtttgagcagatgcagccatgacagcagggttacaaaggccaccccagccaggccaccaccctccaccagggctctgccaggatggattgaaccctggccctcatgtgttacttgatgacagcaagatacctgataagaaactgtttggatgtcacagagaacacattttaacagcccagagaggtgggattatcacagagtggtgtaaaagaagcaaaattatttcggataaaccatgaaggaattttattacccagtgcagttataaatcaagttctctgtaaatgcaataaaacaattgtttagtctgcatgattcataccacaaacctcaggattcttggttttgatcttattgccgcaataaactgtctagacagcaattaacaaactgtttttccttcagatgtttggagtgctggtacagcgggaatcggcacttagaaattcaggggcttcttcctggctcctattaattatcaggttgggtgagtgggaaaagcccagaatcttctcagaattagccttctggaagtgtccttcccctgtgaatgtgccacttcaccacataatattcacttataactggcagaaaatccaaatatacagattttcttaaaccttggcctgtcactttagagagaagtgagcagaattaactttttttttttttttttttggagacagtcttgctctgttgcccaggctggagtacaatggcatgatcttggctcactgcaacctccacctcccgagttcaagtgattctcctgtcttagcctcccaagtagctgggattacaggaatgcaccaccacgccctgctaattttgtatttttagtagaaacagggtttcatcatgttggtcaggctggtctcgaactcctgacttcatgtgatccacctgccttggcctcccaaagtgctgggattacaggcatgagccaccatgccatgcctggcctagcttttgtatatccttggagcaaaatttatatacagataagtcatttcttcatgtattcattcatttattcagcattagggtataatagtttagaacactcactcaggagtctaatcgactttcgtgccatttcaggtacgtgatttcaccttcctgaagtttattttgcatatgttgaaagtcatggaggaaaattaaatgaaattatctgtgtaaattgcctggaacataataagagctcaaaactattcactattattgtctatcatccatgcattcatctgtccatccacgtattcaccatccctctatctatccatccatccacccacctatccatccattccttcacccttcctttcttccttccttctatcatttattcacctatctgtccattcttccttcttttctttccttccttccaacatttatccatccatccatccatccatctatgcatccacccacccacccacccatccttccatccatccctccatctatccctccatctgtccatttatctacacactcactcattcattccttctttgcctggtactctatgccagattgttgagattataaaaacaaataagatatatcccgacttcatggagatcccagtttagctggaaagacagcattaggtctctggctgtaggcagcatctgatcctgaaggaaatagtgagagaaaacctggggaagtgtttagtttctggtctagccctggtgatttaagatgatatgtgagacgcactcacctcccagggctcctgatggctcagagctcagtggatgaacatggcttcatccacacagtcagttacacggtgagactacacatttggcaaatgccccaaacaaacaaacaaacaaacaaaataatttgggttcaaggtaacagtaaatcacactcttcaaacctaaatattcttctctaggcttcttcccaccttttcttcccttctttctgccaactccttctcctccattttgcgtcagacaccatgtgcattgggaggatgttgctaggtcacagtggggacacttgctctatttacagagaaaacagggctcctcagattcacagggtttgcaaaggaaagccctcccagaaaggaattccagccttcccttctgaggctggtgcagcagggctgggggctgcaggaacagaccagagaaagtgactcagaattcccttcggctacagtacgattgcgagaaccattttaagtatgagctgtggctcccctctccctttttcctcagcctccagggagctgccatttaaaaaatcttggcctggccaggggcggtggctcatgcctgtaatcccagcactttgggaggctgaggtgggcggatcacctgaggtcgggagtttgagaccagcctgacccctgaccaacatggagaaaccccgtctctactaaaaatacaaaattagctggaggctgaggtaggagaatcgattgaactcgggaggcagaggttgtggtgagctgagatcacgccattgcactccagcctgggcaacaagagcaaaactccatctcaaaaaaaaaaaaaaaaaaaagaaaagaaagaaagtaatccatgtctttctcacgtaccaacatccagatagaagcagtccaggatgggtagagcagctcctttggtagaacccacctctattgcgctgccatgcctggcacgttgctcccatccccatggtccaagggtcctctcctccacatccccatccagccagcagaaaggggagacaatgaagggaaggcacgccccagaaggatgtgcctccgaggcctctcacatcactggaatgctctccccatagcctaggatttagtcacgagaccgcacaggggagctgagctctttgttctggttggccatgtgtccacatctattactacacaaaagtggggatggccatggagggagaaccagcaaattctttcatacgctcctatggccttgatccatccagtgggtacatttctgagcccctcgctttctcactgcctcttctgctgggagcatgactcccgggctgcagaaggacaggctggtgcattgagagtctttaggctttgcttgaattgcaaatgctctggttttctggcaagacggaagtaggtccctgggcagaagtgtcagaagacctggggttgcctctgaacgtcactgtttctgggtctgagaccttggactcagaaatgaaaaaaacctctgaacctcagtgaaatgggggaaaaaataaatgacttccatagagttattgggaggaccaaactgcattaccaaatacattctgaaaaggtgaaagttctccaaatgattgtgtgttttatcatctccaccaccaccatttttctttttcttttttttttgagacagagtcttgctctgttgcccaggctggagtgcagtagcgcgatctcggctcactgcaagctccacctcccgggttcaccccattctcctgcctcagcctcccgagtagctgggactacaggcacccgcctccacgcccggctaatttttgtatttttagtagagacggggtttcaccgtgttagccaggatggtctcgatctcctgacctcgtgatccacctgcctcggcctcccaaagtgctgggattacaggagtgagccaccgcgcacggcccatttttcttttttcttaatgcatgtatgtagctgaatttgtgtaagtacaatggatccatgatgagagtctatttattgaatttttttttttttttcagatggagtctcactctgtcacccagggtagagtgtagtggtgtgatcttggctcactgcaacttccgcctcctgggctcaagtggttctcctgactcccaagtagctgggattacaggcacccaccgccacgccaagctaattcttgtgtttttagtagagatggggtttcgccatgttggccaggccggtctcgaactcatgaccttaagtgatccgcccgcctcccaaagtgctgggattacaggcatgagccactgcgccttgcctaattatagaaattgtatttggagagaaaagtatactctttctctaagcatttctgacattacattctttcaaagcaatgcgaacaacttctgaaggtactggtctgggctccaagctcagatctgggtggcggaagattctatgaacaggtcctggccaggtttgggggaggtccatgagcaggtcttctcaccaggagcaatatccctaggaaaccaacccacagaatagaaattgaaagagcaaaaaggcttccttttctaagaaaggccatgatgtctccaggaatagcataaatatcccctgcagggcttatcccagaaaagaacattcagaggggcctctgagttgctctgcacccccagcagatgccctgctccaaatggtctcttgtgtctccagctctccacccaggctctacctggaaggctcttctctgacttgtcctcacgcagccccttcaactgagccacagtgacgtcccccataggcatcctggtgagtcctggtggggtatcgtagaggctcaatgacctttaaaatgagttcaggccaggcacggtggctcccacctataatcccagcactttgggaggcgaggcaggcggatcacctgaggtcaggagttcaagaccagcttgaccaacatggcatctctactgaaaatacagaagttagccgggtgtggtggtacatacctgtaatcccagctactcgggaggctgaggcaggagaatcacttgaacctgggaggcggagattgcagtgagccaagactggccactacactccagcctgggttacagagcgagactccgtctcaaagaaaaaaagtcagttcaaactttgcgattcaacaactgggtgactctccggagtcaatgaattcgccaatccatggatactgatgagcttgacctgagctgcttgggaagctgagctgcagtgaatacgatgcagcagatggagccaacgctgcaaagcagagccgcgggcaacacggagttcccgggactccctcaaaatcctcccctttatctacactggctcccgcagacccgcgggcaacacagagagtgcttgggactccctcaaacttctctcctttatctacactggctcccacaacaggatctcaaccctggttgtacttgagaatcagcagggaaacttctaacagttctgatgcctgagccatgcccacagatcaattatatcagaaaccccgtagctgggacctgggcataagtattttaaagctccccaggtgattccaaagtccagccaaggtagacatccactgctctggggaccttgtccatcccacaggtagaaggccccatctgtgaccacttttctgaggtccagacttgccaatttattttctcaacatcaccatttcagtgcctaagagacaactcatcttgccagagtaaagtggattgtcccctccacacctgcttctcttctcaccagggtcccccagctgtttcagggcaaaaactgaacaccttctgattcttttctttgtctcacagcccatagccaatttttttggaattctcaacagctataatgtcaaaatatatccccattctaatctctgctccccacctcccctgctagcctggagatcccctattcttcttttgaatccttctagtttggtctctgccaacagctcatgtaaaatctatgaaaaaatgaagctccgggttgggtgtggtggctcatgtctgtaatctcagaacttgttgttgtcgttgctgttgttttgagactgagtcttgttctgtcgcccaggctggagtgcagtggtgaaatctcggctcactacaacctccacctcccaggttcaagcaattttcctgcctcagcctcgtgagtagctgagactacaggcgcgtgccaccacgcccagctaattttttcttttttttgtatgtttagtagaagcgaggttttaccatgttggccaggctggtcttgaactactgacctcaagtgatctgcctgcctcggcctcccaaagtgctgggattacaggcgtgagccaccacacccggccaatcccagtactttggaaggctgaggtgggaggattgcttgagcccaggagatggaggctgcagtgagccatgattgtgccactgcactccagcctgggcaacagagcaaaaccctgtttccagaaaacaaacaagcccaaaaactcagcatgaaaagatgctcagctcattagccattggggaaattcaattaaaaccaaaagaagggccgagcacggtggctcatacctgtaatcccagcactttgggaggctgatgtgggtgagtcacctgaggccaggagttcaagactagcctggccaacttgatgaaaccccatctctactaaaaataaaaaaattagccgagtgtggtgatgcacgcctgtaatcccagctgctcgggaggctgaggcaggagaattgcttgaacctggaagacagagattgcagtgagccgaaattccaccactgcactccagcctgggtgaaagagcgagactccatctcaaaaaaaaaataaagatatgttgagatacacaaataccattgtgttacaattgtccacatcattcaaggcaataacatgtacgtgtttgtagcctaggagcaataggccataccatatagcctaggtgtgtagactcactccataacgtacccataataacgaaatgccataatgtaccaacaggagaacagatgaacaaattatagtatgtttatacaatgaaatactactcagcagccgggcacggtggctcacgcctgtaatcccagcactttggggggccgaggtgggcggatcacgaggtcaggagatcgagaccatcctggctaacacagtgaaaccctgtctctactaaaaatacaaaaattagccgggcatggtggcggggcgcttgtagtcccagctactcgggaggctgaggcaggagaatggcgtgaacccaggaggcggagcttgcagtgagccgagatcacgccactgcactccagcctgggcgacagagcaagactctgtctcaaaaagaaaaaaaaaccaaaaaactactattcagcatacaagaaatgaattactgacgcaagcagcaacgtcaataaatcttatagacattcctctgagcaaaagaagctgggtaaactttatgaatgcatttataagaggttctagaaaaaaatgattcaagggtgatatgttaaaatatggcttctagccagtgggatggtcaggggtttgactggattgattgaaaaggagcatgagggagccttctggagtgatggaaatgatttttatcttgttttgggtggtgattacaggtgtccaaagttactgaactcacttaagagctgtaagtcttggctgggcagtaatcccagcactttgagaggccgaggtaggtggatcacctgaggtcaggagttcaagagcagcctggccaacatgatgaaaccctgtctttactaaaaaaaaaaaaaaactacaaaaattagctgggcatggtggtacgtgcctgtagtcccagctacttgggaggctgaggcaggagaattgcttgaacctgggaggcggaggttgcacgctgcagcctgggccacagagcaagactccatctcaaaaaaaaagaaaaaaaaaaggaactgtaagtcttactgcatgtaaatcataccttaaaaagtaatttgggggccaggcgcggtggtgcatgactataattccagaacttttggaggccaaggcaggcagataacttgagaccaggaatttgagactgagactaggctgggcaacatggcaaaactctgtctctataaaaaatacaaaaattagctgggtttggtggtacacaccagtagtcccagctacttgggaggctgaggtgggaggattgcttgagcccaggaagttgaggctgcagtgagccatgagtgcaccactgcactccagcctggatgacaaaacaagaccttgtctcaaaaaaaaaaaaagaaaaaaaaacacagagtcccacaaacctctgctcaaactccccctaccctcacccccaacctttaggacaaaatctggagcacccactctggtcttcagagccttgcatgaactgccgtcttttccctccttggcagtgtctacaaccacccttccctttgctcttttttttcagacagagtctcactctaacacccaggctggagtgcagtggtgccatctcagctcactacaacctctgcctcccaggttcaagcgattctcctgccttagcctccatgtagctgggattacaggcatgtaccatcgctcctggctaattttttgtatttttagtagagacggggtttcaccatgttggtcatgctggccttgagctcctgacttcaaatgatctgcccgcctcagcctcccaaagtgctgggattataggcgtgagccaccgtgcccggctggcttttctttatagaatgcctgccggtgtatacatcactaagcaatcattcttttagttctcacacacttttttggaaacaccatgcattcttttgtacttaggggctttgctttaatattatgttcctgagattcatccaggaccactattaattttcatagttgtgttctaatctatgatgatcacataatttagtcacccattttcttgggaaggggcatttaggttgtatccagatttttgctgttactcacaatgctgccaagagcattgttgtacatggctcctgggacatgtatgccagaaatgtttaggatatttatctatgaatgaaattgcttggtcagagggtatgtgcgttttcagctgtatctgatatttcaaagctattttttaaggtggttgtaccaactacacttttcaccaactgtgtaaaagagtttcctttttgtcctatatccttatcaatactgggtgcccttaaatttattaatttttgccaatcttgcggttttaatttgcattgtctcaatcattaataaggttaatcatcactttatatattgggcatttatcaaaaaataaagctgtgtatttttagatgggaacaaatgcacagaaaaagatctaaaaccgtgattctaagaaggggagtggaaaaggaggggtgggatgtgaatactttgttctgtgtgatcttcacatttttacaacaaaaattatttaatatgcttataaaattcatataaaaatggccaggcatggtggctaatgcctgtaatctcagaactttaggaggccctgggtgggcgaaatcacttgaggccaggagttcgagaccagcctggccaacatggcaaaaccccatctctactaaaaacacgcacacaaaaaaatcagctgggggtggtggtgcacacctgcagtcccggctacttgggaggctgaggcaggagaattgctggaacctgggaagtcaaggttgcagtgaggcaagatcatgccactgcactccagcttggatgacagaatgagactctgtctcaagaaacagaaaaaactggctgggcgcggtgtctcatgcctgcaatcccagcactttgggaggctgaggtgggcagatcacaaggtcaggagatcgagaccatcctggtgaacacggtgaaaccccatctctactaaaaatacaaaaaattagccaggactggtgggcgcctgtaatcccagctacttgggaggctgaggcaggagaatcacctgaacccgggaggcggaatttgcagtgagctgagatcatgctactgcactccagcctgggagacggagtgagactccatcccccccgcaaaaaaaagaaaaaattgatctaaaaattaagcaagatatagatcagtacgcatcattaatttttttattttaaaaaattatatgtaaacacacacatacatgcattgctttatatgtgtgtgtgtatgtgtgtgtatagaagaaggcctgaaataattttctcagagtttttaagggtggttttctgtgtggaggtggggatgcaactgtgcagtggtggagttaaggagggtaggggtagtagggggcggtatataattgttccttttaaattttatgcaccttttaaattggatattttcttcagtctttaatacaaaattcactagttctgcgatttaacatttttatgttattttacaaaaatctttctgatatttccttcattctcaatatccaaattttcttttttttttttgagacagaatcttgctctgttgcccaggctggactgcagtggcacgatctcgactcactgcaagctgtgcgtcccggattcatgcctttctcctgcctcagcctcctgagtagctgggactataggcgcccgccaccacacctggctaattttttttgtatttttagtagagacggggtttcactgtgttagccaggatggtctcgatctcctgacctcgtgatccgcctgcctcggcctcccaaagtgctgggattacaggcgtgagccactgtgcccagcctaaatatccaaattttctgtggactgtcacaggtataaagtaaagtgccccacccccacacccaccatgtccaaaaagaaaagagtaaacaaggttccagtgacctggaccatacctaactccgcctcagttggtaactctgatgtgaacagcacacatcagaagaacatagggccaccactgtgatataggtggtaaaattccctttatcataaacatgtacaatgattacatatccataataattagaaataaaaacatttttaaaggtaaagctaagcagaaaaataaaaaataaaggttcctttatgttcttgagatctgaaaaggaaattatacgtacagcctttacaataccttttattataaatctgtttatgagtttaaaactatgctgtccaatatgtagccactagccatatgtggctatttaaatttaaattgactgaaattaaataacattaaaaattcagttccttagtcacatgggcccactatttcaagggtccaacagttactttgggctagttgctattgtattatataatgcagattaaaaatatttataccaatgtggaaagttctgatggacagtactggattaaaaccttatatagatattattcttgttcaccaccatgtgagaaggtttttaccatgggaaggaattcttgtttgttttttttgtttttttgtttttttgttttttaaattgaggtagggtcttgctctgttgcccaggttggagtacagtggcacaatcacagctcacttcagcctcgacctccaggtctcaagtgatcctcccacctcagtctcccaagtagctggaactacaggtacctgccaccacactcagctaattttttttattttttgtagaaatgggatcttactatgttgcccaggctggtatggaactcctgggctcaagtgatcctcctgcctccagcctcccaaagtgctgggattacaggtgtgagccaccattccttgggccattcttgtattttaagtactcagagacatccaggaaaggtaaccgagtgggtaacttcagcacttcagagagtgcctagtgtgtgattctaagctcatcactccagggacccagcacccaattccagctgtgtctttcctccatttaaatcaccctctgtggatcctattaagtattctcccattctggtcaaactggtttatgaaactactatttgagaagtccagtcttgcaggccgatgggaccctgcctttgtgtggccgtaataaggttatttatgagggctggagccgattctcttgattcttcgggaagatgaaaggtttggtggtaaaggaaagcagaagcttggggagcaggtttctccttatagcaatgactctccagataggataaatcacccaggaccattaaaccttcaagaagagtgctcgtaaacctccgctggaaactcacaaagcatcttctctcttggagcagcctatgtggagagggactcgcctctttttccaaaccaccagccagtcacagattaaccctgctgccatctctgcccaggacactgaagcagaaaatcactttctttttttttttgagacagagtctcactccgtcacccaggctggagtgcagtggcgcgatcttggctcactgcaacctccacctccctggttcaagcgattctcctgcctcagcctcccgagtagctgggattacaggcatccgccaccatgcccagctaattttttgtatttttagtagagatggggtttcaccatattggccaggatggtctcaatctcttgacctcacgatccgcccacattggcctctcaaagtgctgggattacaggcgtgagccactgcacccagccgaaaatcactttcaaagtcatcctttcaggtggccaactgtccctgtttgtctgagatgaaagggtttcctgggacaagagatcaggaaagtcccaagcaagtctggatgaactggtcactctatttcctccgtaccttgggggcaagcaatgcctgcgactcaacaggacaaaaacatttgttcatatttagctcccatttatgaggctctgcaatgtgtcaggtgctgggcaaagacagtgctttacctgacgtgtctcgtttcatcttaacaaccaaatgagcttggtgttattattatccccatttgacaggtgaagaaaccgaggctcagaaagctaaagtgacttgtccaaggtcacaccttaaatggtgtctgtgtctccatagctcatgctctgaactgctcctctaattcttccttatctttcttttttttttttttttttttgagatggagtctcgctctgttgcccaggctggagggcagtggtgcgatcttggctcactgcaacttccacttacggggtgcaagcgattcttgtgccttagcctccagagtagctgggattacaggtgtgcaccaccacattcggctaatttttggatttttatttgtaattttttttgagttggagtctcactctattggccaggagtacagtggcacaatcttggttcacggcaacctccatctcctgggttcaagcgatcctcctgccttagcctcctgagcttaccaggcgcccgccaccacacccggctaatttttgtatttttagtagagatagggtttcaccatgttggccaggctggtctcaaactcctgacctcaagtgatctgcccgcctcagcctcccaaagtgctgggattacaggcgtgagctaccgtgcccagcctgtatttttagtagagacggaatttcgccgtattgcccaggctggtctcaaactcctgaactcaagcgatccacccgccttggcctcccaaagtgctgggattacagtgtgagccactgcacctggccttcatctttcttaatctgccttggatttttggggttccagaagcttcccacaaaaagagtcattggagatacttatattgttaaccaacggggtaggagaatgactttcagctgaactttatttgcacgttaaaaagtcaagtctaattttctaaaactatctggactctttcactggcaaatgccgagttggaaggaaagtccataaatcactcacagacctacattggccgtggctatatgcaaacccagtactgctggtctggccacctgggagcaccaggcataggatggggtgagatttccccaccaaattcagggcatatcagagctcagagtacctgcacccaaagggaaataccccaaacactggcttcaggaaagttctcattagatagacacaagaaagttttgccctaatcctcagtattggctaacagatcacttttattgaggaattactatgtgccaggcaatgcctgttttcatccacttctcatgtccaattatctgcgaaatagataagattattatcccagcccagagatgaggaaactgaggtgtggagagctggcgagattgatctagaccagtggttctcaagcaggggagggtttgccctccatgcacatttgccactatctggacacatttttgatcatcacaacctgggatggggttgctgctggcatctagtgaatagaggccagggatgctgctccacattctacactgcacagaacggcctccctctaccccagtaaaagaaattacatggccccaaatgccaatagctctgaggttgagaaactcttgtctaaatcaagaaaagggtggcaactcctggggaacccttcactccagagtttgaggggctcacatgcctagcaaggggtagagcagtgattagatcccacttgcttttaccttcctatgccctggagaaggattactgaaaggtcagttcaagagggtatgaacttgttgtgtgatgctagaacagtgctgggcacaaataggtgcccagtaaatatttgttgaatgaatgaatgaatactaagtattaataccatttattgagggctttctgtcaatgaacacaccaagtatattgccagcatcatctcatttgattcttggagtagaccccagaggcaggtaccactccccacagtcttattttacagagtaagagacagagagggctgggggcggtggctcacgcctgtaatcccagcacttcgggaggccaagacgggtggatcacgaggtcaggagaccaagaccatcctggttaacatggtgaaatcccttctctactaaaaatacaaaaaagttagctgggcatggtggtgggcacctgtagtcccagctactccggaggctgaggcaggagaatggtgtgaatccgggaggcggagcttgcggtgagccgagatcgtgccactgcactccagcctgggtgatagagtaagactccgtctcaaaaaaaaaaaaaaaaaaaagagacagagagaagaggtctcatgccagagtcatacagcttggccagtgactgaggttttccattcagggtggtccaagtttaacttagaattacattgcctcataccagaatctctggaaacaagaataatttccagggcttacatcatgtagcaactttttttttttttttttagacagagtctcaactctgtctcccaggctggagtgcaatctcagctcactgcaacctcttcctcccaggttcatgccattctcctacctccgcctcccaagtagctgggactacaggtgcccaccaccatgtccagctaatttttttgtatttttttagtagagacagggtttcaccgtgttagccaggatggtctcagtctcctgacctcatgatctgcccgccttggcctcctaaagtgctgggattacaggcatgagccaccgtgcccggcccacatgtagtaacttttttcactgttccaggttttataaatatatcccctttttcagcacttgctctcgcttaccttttttcttttgtaggcagggtctccctttgtcactcaggctggagtgcagtggtgcgatcatggctcaacctcctgggttcaagtgatcctcccgcctcaggctcccaagtagctgggactatatacgtgtgacaccacacccagctaattttttaattttttgtacagacagggtctcactatgttgccctggctgggttcaaattcctgggcttaagctatctctgccacctcagcctcacaaagtgctgagattacaggcatgagccactgcacccaggcagcccctttctaaaaaaataaaatgggccgggcgtggtggctcacacctgtaatcccagcactttgggaggccgaggagggtggatcatgaggtcaagagaccgagaccatccaggccaacatggtgaaaccccatctctactaaaaatacaaaaattagctgggcgtggtggcgggcgcctgtagtccagctacttcggaggctgaggcaggagaatcgcttgaacctgggaggcggaggctgcagtgagctaagctcatgccactgcactccagcctggcgacagagtgagactctgtctcaaacaaacaaaaacgagttttacactattctataaataaaagggtttcagggttagccatgaaaggccccagtgacaaagttgtaatgtgatcagaaatgaaaagctcaaaaaaagatttcagttggtgatgaaacaaggcaaggattatgaatctcacaggcgtttcctttctccagaaactgaaggcacctttgccaggagaaaaaggcagtttccatggcagggacccagccttgacttccccaggatctgtccacatgaacgttgtaatgagtccacccgagatggggactctccattgtatttacattttatgacatctttttatatttcacaggagaggattctgaataaaaatgagcccggcttttagggctgttttttattatcagcatttggtaaaaaacatccttaatgaggtgttaagagtcatcctgcatcctattgtggaggaggcctgggagctcataaacccctgaaaagccacagggtaatttataatccttgatgccaccccttcctgacacaagcgcttcagagggagcatctttagttctcgggcacttcctgcaatttacacgcccaagctgcttcgaccacaatctgaattcaaccttattaagtaaagttcagcccaggattcttcttgccaagctgttcacctctgagaaactctggccagcctgcctgaaattaattagagtttccgttgagtttggactgaaggtgtggctctagaaagtgttcacatttctctccttactggtgaggaatttaacagttatggttctggggaaaaacaataacataacaacaacaacaacaaaaaaaaccacttttgcttctctgcaagaagaggagtttcttgatactgtgatgttttactcataagttcatatcctttctgaaatagacttcaattaagactgagggtgtcctaagccccagaatgatatactacttcattgagaaaaaaatactgccacttatataagggatctaaaagagccagattcatagaatcaaagtgtggaatggtggttgccagggggttgtgggagagggcaatagggaattaccaatcagccaataatcaatgggcataaggtttcagttaagcaacaggaataagttctagagatctgctgtatgacatttaacctagagtcaacgacagtggattatacactgaaaaatttgttaagagggccagccttgtatggctgggagcagtggctcatggctgtaatcccagcactttgggaggccaaggcgggcgcatcacctgaggtcaggagttcgagaccagcctaaccaacatggagaaaccccgtctctactaaaaatacaaaaaaattagccaggcgtggtggcgcatgcctgtaatcccagctactcgggaagctgaggcaggagaatcgcttgaacccaggaggtggaggttgtagtgagccgagatcgcgccactacactccagcctgggcaacaagagcgaaactccgtctcaaaaaaaaaaaaaaaaaaaaaaaaaagaagggccagccttggtgggtcacacctgtaatccgagcactttaagagcccaaggcggaaggattccttgagcccaggagttcgaggtcagcctcggcaatatagtgagaccctgcctctatttttcatttaaaaaaaacccaaaatttgttaaaagtgtatatctcatgataagtgttcctctcaatcaagtaaaataaaacgaccgccacaaaccagactttgtgatggcgacaaatatctcaggtttaatcttgaaatctgtaaattgaagaataaagaaaataatttaatcctttcctttatatccttttttgtttgtttgtttgtttttgtttgagatggagttttgatcttgttgcccaggctggagtgccatggtgcgatctcagctcactgcgacctccacctcccaggttcaagcaattctcctgcctcagcctccccagtagctgggattacaggcatgtatcaccacacccggctaattttgtatttttagtagagacggggtttcaccatgctggtcaggctggtctcgaactcctgacctgaagtgatccactcaccttggcctcccaaagtgcagggattatagacattagccacggtgactggccctttcctttatactttatatccttcttatttggggatctcttttttattttttatttttttaagaaaagtacatatgacatggtatatattgacccttcctgactttattcaattaaatattataattgactattagatggttatttctttattgctgttaatttttttttttttttgagacagtctctctctattgcccaggctggagtgcagtggcgcaatctcggctcactgcaagctccgcctccctggttcacaccattctcctgccttagcttcccgagtagttgggactacaggtgcctgccaccacgcccggctaattttggtatttttagtagagacggggtttcaccttgttagccaggatggtctcgatctcctgaccttgtgatctgcctgcttcagcctcccaaagtgctgggattacaggcgtgagccactgcacctggcctattgctattaaattttaacatcagcatttcacatagtccctatttggctttcatagttcctgttgactgaatatcatttatatttaacttgaaaaatagatatttatatttcacttgtgtggacatagttgaaaaagtgtaggaattatagattttatcatgcaacattttatgttgtttccagcctctgaacgaataaataatttatatgtgcaatgtatatgttttgttcctaggtcctctggggaggcattgtaggggaaaaacccacaaaacctggtgttggagggtcagggttcaagttctgttcttagcaataatgtgatcttgagcccatcaatcattgtttctgaccccacatgtccttattagtaaagtgaaactgataatacatatgccactgcattgttaaattactattataataataattattattatttgagacggagtctcactctgccacctaggctggagtacagtggcgcaatcttgcctcactgcaatctccacctcccgggttcaagcaattctcctgccttgagtagctgggattataggtgcatgcaaccacgcccaggtaatttttgtatttttagtagagacagggtttcagggtttcagggtttcaccatgttggtcaggctggtctcgaacttctgaccttgtgatccgcccgcctcggcctcccaaagtgctgggattacaggcatgagccatcccgcccggactgttaaattagtatttattttctttttcctttttttgagacggagtctcactctgtcgcccaggctggagtgcaatggcgcgatctcggttcactgcaacctccgcctcctgggttcaagcaattctcctgcctcagcctcccgagtagctgggactacaggtgcacactgccacacctggctaatttttttctattttagtagagacagggttcaccatgttgcccaggatggtctggaattcctgagctgaggcaatccacccttctcagcctcccaaagtgctgggattacaggtgtgagccaccgtgcctggcccttctttttttttttctgagacgaattcttgctctgtcacccaagctagagtgcagtggcggatcttggtttactgaaacccccgcctcccaggttcaagcaattctccagcctcagcctcctgagtaactgggattacaggcatgtgccatcatgcctagctaatttttgtatttttagtagagacggggttttaccatgttggccaggctggtcttgaactcctgacattgtgatttgcccacctcggcctcccaaagtgctgggattacaggcatgagccaccatgcctggcctatttattttcattataattgacagttatttaattaagtataaacttttagctacgtgttgtgaatgtgtgttatgtcacttgactaacctataaagtgtgaacagttattagcatcacaggtgaggttcttgagcctcagagaggttaagtgacttgcccatggtcacacagcctgaaagtggcaaacctgggatatgaacctaggaacatatgactgcaaaaacagtaccccaagtcattcgacgtgaagctgccttttgatgatgtaagtgagattgactgcgacttgtaaagctgtctgtaaatgcctagttaagagagatatggccaagacatcagaaattttgagcagaagaaggttctaggaatcaactaattaaataacgtgattttagaatgatgaggccgagagtctaccttgggtcagaaactaagatagagatgtcagatgagaagacagatgcctagctgcaccctgggctccctgtagtgctgtgtttaggttctcagacccgggagtcagagcctgggctcaatattgagctccggttcatactagctgtgtaccttggacaagatatgtaaattctctataccttagtttctgcatctctaaaatgggatagctaagagtaattacaggctgggtgcagtggctcatgcctgtaattccagcactttgagaggccaagatggatggatcacgcgaggccaggagtttgagactagcatggccaacatggagaaaccccatctctactaaaaatacaaaaattagccgggctggtggtgcatgtctgtgattccagctacttgggagcctgaggcagaagaattgcttgaacctaggaggcagaggttgcagtgagctgagattgcactgctgtacgcaatcctgggtgacagagcaagactctgtcttcgggaaaaaaaaaaaaagtgtaattatagaaagattaaacaagtttaaaatgtgtgacatgcttaaaatagtggtaatttataaatgtatcattattctggccaccactgatcgtctttaaaactgcaccattcctatttgatgagctgaacatacaaaaacatccatggataccattatcatctttatctcttgcgaaacagcaaatgatgaataaacccgtacaattcatttttctttttttcttttttttttgagatggagtctcactccgtcacccaggctgcagtgcagtggcgcgatctcagctcactgcaacctccgcctcccgggttcaagcaattctcctgcctcagcctcctgagtagctggtaccacaggtgtgcaccaccatgctcggctaatttttgtatttttagtagcgatggggtttcaccatgttggccaggatggtcttgatctcctgaccttctggtccgcccgccttggcctcccaaagtgcagggattccaagtgtgagccaccatgcccggcctgtacaattcatttttctaagccactaatctgatcaattatttcactgccttgattaacacttttccatgaagtatttacaagtcacatatctgataagtatccaaaatatgaaaacaactctcaccacttgacaattgtattcattgtttttaagacaaaaaatccaattaaaacacgggggaaaaaatggaatagacatttccccaaagtacatatacaaatggccaaaatgtacatgaaaagatgctgaggatcattagtcattagcgaaatgcaaatcataactgcaatgtgatgccacctgagaccctgtagggtggctataataaaaaatatggagagtaacaagtgttggcaaagatggagagaaattggaactctcatacattgttggtgggagtataagtggtacagctgcttttgaaaaatctggtagtttcttaaaatattaaacataattttcatttgatccagaagttctactcccaggtatatatttgagagaattaaaaacatatgtctacaaagaaactgtttttttttgtttgtttgtttgttttgtttttttttttagacagggtcttgctctgttgctcaggctgaaaaacagtggtgtgatcttggttcactgcagcctcttcctccagggttcacacaattctcgtgccccagcctcccaaatagctgggattacaggcatgtgccaccatacacggctaatttttttttttttttttttttttttttgcatttttagtggacatggggtttcaccatgttggcctggctggtctgagactcctggcctcaagaggtctacccaccttggcctcccaaagtgctgggagccactgtgcctggccctctacacagaaatgtgtatacaaatgtttatagcagcattattcctaaactccaaaaagtagaaataacgtaaatgtccattgactgatgaactgataaacaaaatatgctctacctatacaacggaatattattcagctgtaaaaagggaagaagtagatcactggcacagaatagagagcccagaaataaaccttcaggtatatgggccaatgatctttgacaagggtgccaaaactacacaaggggaaaaggattgtctcttcaacaaatggtgttgggaaaattggatatctacacaaaaagaactaaagacatacccttttcttcttgtgccatatacagaaattaattcaaaatggattaggaaccagggctttgtgtggtgtctcacgcctgtaatcccctcactgtgggagacccaggcaggaggattgcttgaggccaggagtttgaggccagtctgagcaacacagcaagaccacatgtctacaaaaataataattgtaaaaaagattaaaaacctaaacataagacctgagattataaaacttctagaaggaaatatactggggcggggcggagtggctcatggctataatcccagcactttgggaggccaaggaaggcggatcactggaggtcaggagttcaagaccagcctggccaacatggtgaaaccccgtctccactaaaaatacaaaaattagctgggcatggtggtgggtgcctgtaatcccaggtactcaggaggctgaagcaggtagaattgcttgagcctgggaggcagaggttgcagtgagccgagatcctgccactgcactccggcctgggcaacaagagcgaaactctgtctcaaaaaacaaaacaaaacaacaaaacaacacaaaaacagaaaacaaatattggcaagaaattggtacccttagatactgttggtgggagtgaaaaatggtgtagccaccatggaaaacagtatagtggttcctcaaaaaatttaaaataaatggctgggcgcagtggctcacacctgtaatctcaacactttgggacactgagacgggcagatcacctgaggtcaggagtttgagcctggacaacatggtgaaaccccgtatctactaaaaatacaaaaattagccagaaatggtggtgcgcgcctgtaatcccagctactctggagactgaggcaggagaattgtttgaacccgggagtttacagtgagctgagatcgcaccactgcaaccccagcttgggcgacagagcaaaacttcatctcaaaataattaattattaaattaattaatgaccataaaaaactatcacctgattcggcaatcccacttctgggtatatatccaaaagaattgaaaacaagatctcagagagagatttgcaacatgttcattgcggcactattgacaatagtcaagatgtagaagcaaccaaaatgcccactggattaatggataaagaaaatgtgggccaggtgcgggggctcgcacctgtaatcccagcactttgggaggctgaggcaggcagatcacttgaggtcaggagtttgagaccagcctggccaacatggtgaaatgccgcctccattaaaaatacaaaaattagcccggcatggtggcgtgcgcctgtggtcccagctactcaggaagctaaggcaggagaatacgatgaacccaggaggcggaagttgcagtgagctgagatcgcgccactgcactccagcctgggtgacacagcaagacttcgtctcaaaaaataaataaaaataaaataataaataaatacacccagaaaaggcacttgtttatagaatgagagctgcaattagaaggtagcgtgttttcttgtccatgttgggcactgctctgtgcacatctgcaaacgaccttaagagcaccaggagcactaatttgggggttacaaataaatttcagtgagtaggtgaatttgaaaatatgcaggcctcaattaatgaggatcactgtcttttgaagaccattattgcataagtgcatttggaaaagccagcctcattctgatgaaaaaccgtgcgagtattgctggagaaatgttagagtcgaaatttttcctgatttgcagctgagagtctcctaactgatccagaatcccagatttcaccaagaatcatgaatgaaagggagtgttttccatagcatttgggagacagagatttcacacccccaagatgagtcacaactgattattgagggattctctgtggctaggatatttcagccaagagttgaagaatgcagaagtccttcttcctccgtacaggagagcccatcttattatttccctctctcttgttcctaagacatggctgtttactcttttatttttgagacacagtttcactctgtcgcacaggctggagtgcagtggcatgatcttggctcactgcaatctccgcttcccgggttcaagtcattctgccattctcatgcctcagcctcctgagtgactaggaattacaggtgtacgccaccacgcctggctaagttttgtatttttagtagatacggagtttcaccatgttggccaggctggttttgaactcctgacctcaagtaatctgcctgctttggcctcccaaagtgctaggattacaggcgtgagccatcacacctggctggtttcgctgtttaaaaacccattctgggccaggcgcggtggctcacgcctgtaatccaagcactttgggaggccgaggcgggcggatcatctgaggtcaggagttcgagaccagcctgaccaacatggagaaaccctgtctctactaaaaatacaaaattagccgggcgtggtgaggcatgcctgtaatcccagctactcaggaaggctgaggcaggagaattgcttgaacccaggaggcggaggccaggaggcagaggttgcggtgagtcgagatcacgccaccgcactccagtctgggcaacaagagtgaaactcggtctcaagggaaaaaaaaaaaaaagaatctgctggatgcggtggctcacacctgtaatcccagcactttgggaggctgagttgggtggatcatgaggtcaggagtttgagaccagcctggccagcatggtgaaaccccgtctctactaaaaatacaaaaaattagctgggcatagtggcacacgcctgtagtcccagctactcgggaggctgaggcaggacaattgctggaacccagcaggtggaagttgcagtgagccgagatcgcgccactgcactccagcctgggtgacagactgagcatctgtctcaaaaaaaaaaaaaaaaaaaaaaaaccccaacaaaaaccaattctaacatgcttttggttccagagcgctctggaaaactcaaataagtcactatagttaatataatagtagatccagtttccatttggctgcctgggttctaatctgagctctattctagctgtgcaatgttgaaccagcttatgtgcctcagtttcccttgtctgtaacaatgtaaaatttttgcagtagatgtaaaaatcattgtgaagattggtgggctttttgaggaagatgcagttacaggtactgcgaagcggtggtctgcctgctcctgatcctgcctcaccgctgtgggctctcaaggaacaagtgggtcaggaagccacacgctgcagccatggcttttatctgtttattgatttttagagctgggggtctcactgtgttgcccaagatggtctgaaactcttgggctcaagcgatcctcctgccttggccgcctgaattgctgggactacaggggtgagacactgtgctcagctcaaaatgtattaagagcaggcattgtggacctcgtgaggcaattcacattgccattttaagctacatatttaaatctaagctgtccactaggctttggagaggcatttcctgaatgtctgttctaaaggaggaactcttccaaccctcttgttctgtggcagataaccctgatcatgacttgcaattactttatttcaatttatattttggtttgttctcatcactagaaatgaaagcctcataaaaacagggactttattgctcctgttcatctatatatccccaggacagtgccaggcacatagtagatgctcaataagtatgtgttgactgaataaacgaatgaataacagaatttggtgtctgactcccaagcccttgtacttaacacaaggctgtgcttcttctcacacccttctttgtgtggtagtgggtttggtcatgacttagagcagcattgtccaatatggtagccactagccacatgtggcaatttaaatttaactttaaagtagtgaaagttaaataaagttaaaaacccagctccccaggcatgctagtatatttccagtgctcagtacctacatgtgacaaatggctagtggagagttcccatatagaacatttcaattgtcacagaaagttccattaacggagctgattgagatcagtggttctcaactggagaagattttgcctcccaaggggcatttggcaatgtctggaaacctttctagttatcacagcttggaagatggacctgacatctagtgggtagaggccagggatgctgctatacatgctacaatacacaggacagcttcacgctagagaagtatttggcccaaaatgtcagcagtactaaggctgagaaacatggtttacaggaaggcactggggtgacagttttctctgtatgaccagaatgctaaattcctcaggatctggatgggttaatttgcaattaaaagcctgataaggactcttcagtgtatgtggcatggtgtctagtttcctggcttgaattcctggaattcctcctaatattttgaataggatattaaaatccagaaatcattgcccagctgggttttcaagtgcccacacttccctgtgagactcattcaacgggattcacaacactcagaccaaaaggcatttctaaggctagattgttctagatcaaggctctgtaagacacagtcccggccaagcctgcccgtgaacagaatggcttttatatatttctttaattggatgagaaacaatcaaaagaaggccagatgaggtggctcatgcctgtaatcccagaactttgggaggccaaggcaggcggatcacctgaggtcaggggttcgagcgagaccagcctggccaacatggcgaaaacccatctctactaaaaataacaaaaattagccgggcatggtggtgcacactgtagtcccaactactcaggaggctgaggcaggagaattgtttgaacccgggaggcggaggttgcagtgagctaagatcgcaccactgcactccagccagggtgatggggtgagactcggtctcaaaaaaaaaaaaaagaaacaattaaaagaagaatattttatgacacatgaaaattatataaaattcaaatttcagtgtccacaaagaaaacttctttggaacagtcaccaccataatttatataaaagtattgcccagggctgctttcgtgttgttgagtggtccagccacagaagccacagggtccgcaaagctgaaaatattcaccacctgcccttttacagaaagactttgctaattcctgctctagatactaaagaccttactggattttttctttccttccctccccctacccatttgttcttttattttcttaagatcaaaattatcctgataatttgcaggtgtagacacagagcaaatgaccaaatggactttcttcgggaagccgagggcggaggggattagcttccatgcaggggcgttcatgtgaaagattcctcttagatgaatttagggaacaaagaccccgtggtcaatgatttctgtgggtctgaaagtaaaagactggctgagttcttttgtcagttttgcagcacagatcatacagttactgaatactcccctccacggtagtattcttttaacgcttcactccatgacctcacaaaaataattgctgggaagcaaatttacttcgccctctgcctttatttgctgaccaaggggctcagccgatagccgtattgttgatggaaatgcaaaagggggtggagggaaggagaaagaatacaatttggccagggaagatggatatattgaaaggattcgaggatttgtccttgctttataattggagtcaggattttccttcaagttaccctgcacagactggaaggaaacctctccagcctcctccacccccatggcctgttaaactctttctcaacaaattgaaatctggcttttaaatccttgtcatttttatgattatatgattatagcgaacattacaacttgtccagtgaatggactttaaaaaaaattttttttttttttttttgtagtgagcatcaggctatgttgaccaggctggtcttgaactcctggtctcaagcaatcctcttgccttggtctcactttttcaaattctgagaatgtctttattcagaaagaaagtaaaaactgattaaaaatgatttgtatgcattgggaccagttgggatttgatttttttttctctctaagtctacaggagttttcaccgatggctttcaattctttggaatttctggaaatggaagcttgcatcttggaagcaaacctacaaacaaccttatattgtcccataccctcattttagaaaacagaccactctgattactgtggggattacctggagtgatctgggattcccttggcaggaacaaagtggaaagattttccggccctttaatttgtaaaacgaaaacctgtgttggctgctactggtagaaaaataaaaaattaatacacccaaagtaaaagttagcaaggataactgccaggccagacacagtttgttataagccccgcaatgtgcaatattgaaagtggtttccttcccctagtacttaggcatccaatcagtcaaaccatctgataactgcttatctcctctaatgcgactgagatgtgtttgatgactctttgcatttcaatcgtaaagctcaccttaggtaagcaccttgaggagaaaaaagaaattcacaagtctcagcttttgcattcatggaattttcttttcacaatggaaggaaagttaagctggtgcccgttagggggaggggtgcagaggtggttgaagatctttgaaagggaggggcgcagtgttcagtttgtgtgtagtgcacacacacatacacacacatacacaaaggtaaaacacttcatttgggttaaatggttgagaaacaatcaaaagaagaatattttatgatgcataaaaagatatgaaattcccatttcagtgtccattaagaaagctttattggaatgtagcttcttgtctcaggagccaaaatagtaaagcaaagcaaagcaatcccgagagagggggaagatgaaagatgaacgggccactctatgcttcatttttagctacctgaggacacaggaaaaatagaaaatgtgtataaggaaagatttccaggattttggtaatcataacttggcatgtctgactccctgcacccacagtgctttttataatcctctacccagcaatcttctgtgaaatggggaagaagcggggcacctctctcataggagtaaaaggttgatagataggcacgtgtttattctagcctggcacacagtacatgctcagaaaatcttagctgttattcttatcggggtggttattgttttgttttgttttgagatggcgtctcgctctgttgcccaggctggagtgcaaggcatgatctcagctcactgcaacctccgcctcccgggttcaagcgattctcccgcctcaaccacccgagtagctgggactacaggcgcccgccaccacgcccggctaatttttatacttttaatagagacagggtttcaccatgttggccaggatggtctcggtctcgtgaccttgtgatccaccagcctcggcctcccaaagtgctgggattacaggggtaagccaccgtgcccggccaggggggtggttattgttaacagcagttgctcttgtacttttccatctcctattgttggagaagtattagattggtgcaaaagtaattgtagtttctgccttactttatttttatttttatttttttattttttatttttgagatggagtcttgctctgtcacccaggctggagtgcggtggtgtgatttcggctcactacaacctccgcatcctgggttcaagagatcctcctgcctcagtctccccagtagctgggattacaggcgctgcaacttctgcctcctgggttcaagagatcctcctgcctcagtctccccagtagctgggattacaggcgctgcaacttctgcctcctgggttcaagagatcctcctgcctcagtctccccagtagctgggattacaggcactacaaccaaggctggctaatttttgtatttttagtagagacaggatttcaccacgttggccaggctggtctcgaattcctgacctcaggtgatccacccgcctcggcctcatggagtgctgggattacaggtgtgagccactgtccccgaccacttttttgccttacttttaatggcaatttatagttggttggtgcaaaagtaatttctgcaattacttagtataacttcaacttggttataacttggtataacttcatttgggagcagtttggcaatattcgccaaactttaaacatacactttcacccagcaactcagtttataggagttcttcctatggatcaattccctcttcatatgccaatcagaattcatatttttgttttgaattccaaaccacgtgcatgtattattgttttagttttgtgttatcaggatatacatatttaggattatgtcacttggtgaattgactccattatcattttgaaatgtcccattttttccctggaaatatttctcaaattgaaatctattttatctgaaattaatgcagccaatccactttattaggctttgtgtttgcatggagtatctttttcaatcccttacttctaatctacctggtctttatatttaaagtggggtttcaggctgggtgcgatggctcatgcctataattccacaactttgggaagctgaagcaggcagatcacgtgaggtcaggagttcgagaccagcctggccaacacggtgaaaccccttctctgctaaaaacacaaaaattagctgggcatgctggcgcacgcctgtaatcccagctacttggaaggctgaggcaggacaatcacttgaacccaagaggcagaggttgcagtgaactgagactgtgccactgcactccagcctaagtaacacacacctaaggtggtgtgagactccacctcaaaaaaataataaataagaaataaagcagagtttcttagagacagcatatggttgggtcttgctctcttacaaaaccaacaacttctgacttcaattggaatatttagatcatttacccttataggaattttttatatggttgaacttaaatttaccatcttgctctttattttttattgtcctatttgtagtctattctttttccttctttttgcctggctccctttggaatgagttattttttaggattccattttatttccatgactggtttattagctatatcttgtttttttttttttggttgctctaaggtataaagtatgcatcttcagcttatcacaatgtaccatcaaatgataacagttcacatataatataaaaatcttgtagcaatatacttccctctccccatgtcttttgcactgtatttgtcatagattttattactacttatgttataaactctgaaatatttgttttttttttcttgctttagagtcaattgtcttttttttttttttttttgagatggagtctcgctctgtctcccaggctggagagcagtggcgtgatctcggctcactgcatcctcagcctcctggttcaagcgattcttctgcctcagcctcctgagtagctgggactacaggcatgtgccaccacgcccagctaatttttgtatttttagtagagacggggtttcaccatgttggcctggctggtcttgaactcctgacctcgtgatccacctgcctcagcctcacaaagtgctgggattacaggcatgagccattgcgcccagccaattctcttcttcataaataaaattttaattttagaacagttttaggtttacagaaaaattgaaaagattgtactaagagttaccatataccctaaacacagttttccctgttattaacatcttacattagcatggcacatttgttttaatcagttaaactattagccaaacattattattttattattattattatttttgagacggagtcttgctctgtcacccaggctggagtgcagtggtgcaattctggctcactgcaacctccacctccaaggttcaattgattctcctgcttcagcctcctcattagctgggactacaggcgcccaccaccacacccggctaattttgtgtatttttagtagagacaaggtttcaccatgttggccaggctggtctcaaacttctgacctcaagtgattcactcgccttggccttgcaaagtactgggattacaggtgtgagccactgcgcccagccaatttttgtatttttagtagagatggggttttaccatgttggccaggctggtcttgaactcctgacctcaagtgattcacccagcttggccccccaaagtgctgggattacaggcatgagccacctcacccggccaatttttgtatttttagtagagatggggttttaccatgttggccatgagtcagtctcaaactcctgacttcaggtgatccacccaccttggcctctcaaagtgctgggattacaggtgtgagccactgcgcccggccagccatacattattgttaattcaattgcatactgtattcaggtttccttggtttttacctaatgtccttttactgcgttaggatcctatctaaaccaccacattacatttagttctaatgtctctttaggttacacttagctgtcatagtttcttagactacccttgttttgaaaacctcgacagttttgaggagctttgggcaaatatgctgtagaatgtccctcaattgaatggcttgaacccgggaggcggaggttgcattgagctgaaatcctgccattcactccagcctgagcgacagagtgagattctgtctcaaaaaaaaaaaaaaaaaagaatgtccctcaatttggatttatttgttgttaaatgtttgtggaaggaaaaccacagaggtaaagccattctcatcacattagatcaaaggtacattctatcaacacgacttatcattgttgatgttaacttggatctcctggctgagctagtatttgtttactgtaaagaaaatctttagctctgtgtttatgagctcatgtctaccttcagaaccaaaattgcagaaacggaaaagtagtttgccaaaatcctcaagaaccatatacttcggataacgataaaatttagagttattctggcacaggtacctctccaagtcaccctcactctcctcaccagttccatactaccttgctcctccagccaacttggtcatcagaaagcacttatttatttattcatttgtttagggtctgtgaccttgcaatgacacattctctatgtctctgcatcaggcttctcttcaactccctgagcttcagatacttcctcttacctcctccgtccttcctgagtgctgggatgatgggtgttggaaaaggactttgaaagccgtatatacagtactatacaaaaatgagtcatcgttataaatgtaagctctgctgtcgcctgccatctctccgtatctcccttcctctcccctccacgctcttgctagaatgtagaatatagagatccaatggtacttcctcccaatatgtgtcttcaaactcagagctctagtcagtgggtcccaacttttttggcaccagggactggttttgtgtaagacaatttttccatggatgggatgggttgggggaaatggttttggaatgaaactgttccacctcagatcatcaggcattaaattctcataagaagcgtgcaacctagatccctcccatccgcagttcagaatagggttcccgctcctatgagaatctaatgcctagagagatctgacaggaggtggagccccggcggcaacgctcgcccacctgccactcccttcctgccctgtggcctggttcctaacaggtcatagcccagtacctgtccacggcctgggggttgggggcccctgctctagcccataagactaagccctttgtatggtctaaatatttcctccaaaattcatgtgttgaaacttaatggccagagtgacagtattaagaggtggggcctttggaggtaattaagtcatgagattagagcccttgtagaggggatttggccccttataaaagggcctgctgggtgcagtggctcacacctataatcccagcactttagaaggtttaggagggaggatcacttgagcctagaagtttgagaccagactgggttacatagtgagactctgtctctacaaaacacttaaaaattagctaggtgtggtggtgcattcccacagtcccagctactcgggaggttgaggtgagaggattgcttgagctccggaggtagaggctgcagtgagctgtgatcgcaccactgcacctggcaccaacatttaatttttaaaaagtattcatttagtatgaattttagacttaagaagagctgcaaaaatggtacagagtcctcttgtatcctcaccttccttcttctattgctaacagtctgcatacttatagagtacaatgaccaagaacagaaaatttcaacactggtacattattatcattactactactactacagacctcatttaaatttcattgctgctctcctcaatgtctcttttgtgttccatgatccctcccagggtcccacattgcatgtgactgttctttgtctttagtgtcttccagcctgtgccagttttctttccttgtggggtttgttttttttttttttttttttttttgagacagagtcttgctctgtctcccaggctggagtacagtagcactatctaagctcactgcaacctctgcctccaaggttcaagcgactcttatgcctcagcctcccgagtaggtggaattacaggcacccaccaccacacccggctaatttttgtatttttagtagagaccaggtttcaccatgttggccaggctggtcttgaacacctgacctcaagcgatccacccaccttggcctcccaaagttctgggattacaggcatgagccatcacacccagccaagaattatctttcaaaacaatttattgatatatttggtacatgtaaccctccactttttttttttttttttgagatagggtcctgctatgctgcctaggctggagtgcagtggctattcacatagtgcattacggccttgaactcctagactcaagcaatcctcctctctcagcctcctgagtagccgggactagaggaatgtgctaccatgcccagctgggacttcgttttgaagccaatttttttaattatatgtaattttttactttctttatatttcattctttattttttattttttgacacagagtcttgctctgtcacccaggctttgcctcagtatccctagtgactgagattacaggtgtgtgccactacgcccagctctaattttttactttctccagtggtttcaaaaccaaacctccagttcaaatgcaactttaaaaattatactgctacaacttatggatattaaaattacccaaagctacaaactattttcctttcttttaccctatattgacatataatcagacatactgaccaatgagaacatcttccttcagtctcaggtcctgaagaacaaaggttctattttaacaactgaaaatttgaatcgagttttgtagttttttttttttttttgagacggagtcttgctctgtcacccaggctggactgcagtggcgcgatctccacactcactgcaagctccgcctcccgggttcacgccattctcctgcctcagcctcccgagtagctgggactacaggcgcctgccaccacgcccggctaattttttgtatttttagtagagacggggtttcaccgtgttagccaggatggtcttgatctcctgacctcgtgatccgcccgcctcggcctcccaaagtgctgggattacaggcgtgagccaccgcgcccagctgagtttgtagctttttactgagtattttcaattctgggacttcattctggagagtcatgtcataagcaagccaatttttctacgtgaggatgtgttttgcagctttgcttgcaactgtgaaaattggaaataaactcaatgtccatccgtagggaagtgattaattatattgtatatccacatggaaaagtgagggactaatttaaaaaaaaaaaaaaaaaaaaagaatggccaggcatggtggctcatgcctctaatcccagcactttgggaggccgaggcgggtggatgacctgaggtcaggagttcgagaccagcctggccaacatggtgaaaccccatctccactaaaaacacaaaaattagccaggtggtggtgcacacctgtaatcccagctacttgggaggctgaggcaggacaatcacttgaacccaggaggcaaaggttgcagtgagctaagattgggccactgcactccagcctgggtgatggagtaagactccaactcaaaaaaaaaaaaaaaaaatgaggcagaaagtttatgtaatgacatagaaagttatgtagaccagtgctagaaagtgctacccaatagaactttctgcaatgatggaatgttctatgctgtgctgtccaatacagtagccactagtcacatgtagtacttgaaacgtggcaagtgcaatggagaaactgagtgtgtaatgtaactaaagtaattatttattttatgttattcattaatttatttttagagacagggtcttgcaatcttgcccaggctggtcttgaacttctggcctcgagcaattctccttcctcagcctcccaagaagctgggatgttaggtgtgtgccactgcaccccgctatttatttgaatttaaattcccacatgtggcctatgatattgtactggacctcacatattttaaatgtgttttgaggacaggctagttgaaaaatgaagagtatgattcctctaaaagataataaataatatatgttaatttagaaatttttagaagtcagacagaaaatacactgaactagtaatagtgggtttccctgagatatactgaagactttttttttttttttttgagatagagtctccttttgtttccgaggctagagtgcagtggcaggatctcggctccctgcaacctctgcctcctggggtcaagtgattctcctgcctctgcttcccgagtagctgggactacaggcgtgtgccagcacgcccggccaatttttgtatttttagtagagacagggtttcaccatattggccaggctggtcttgaactcctgaccttgtgatccacccacctcagcctcccaaagtgctgggattataggtatgagccactgtgcctggccatgttgaagacttttaataccatatattcatacagtatttgaatttttaaataaggaacataatttgttttgaaataaacactacaaaataaagtcaaactctgaaattctaaattgcttcaagttaaatgaaccgagagcgtggttggaggagaaacctgagagaatcttctggaagaattaccagaatttcatgtactctgaggaagatgctggggctgacaggtttgaagccaccaggtggggttaacagggtaccataggggctcttaggaggtgggtttaggaaacaattttcttttttattttttttatgatggagtttcactcttgttgcccaggctggagtgcaatggtgcaatctcagctcaccacaacctctgcgtcctgggttcaagtgattctcctgcctctgcttcctgagtagctgggattacaggcatgtgccaccatgcctggctaattttgtatttatagtagagatggggtttctccatgttggtcaggctggtctcgaactcctgacctcaggtgatccgcccacctcagccgcccaaagtgctgggattacaggtgtgagccaccacgcccagcctaggaaacaattttcatagagacaaagagagctgaactctactgctctgctcctctggtgggttgcaaattctagtatagtgtcttcttactgtatcccagtgcttagcacaatgactagcacagaatcactgtgcagtagacaggaatgaaagcctgacaagatgcttcaaagccttcattactgggaattcagcatccaagtttaaacatggtctctgttggtaccaaagcgcacccaggttttaagtattttaaaagagtgcccaaaatataatggaaagaggccgatactttcttttgctaggccctccctgccaagtctaataaactgatagatgtaaattagcattgggaggatgggcattgtggggaaggacagaaatctctctttgccttcaggaagttgcaattaggtagattgacattgtgggatagaggtaggggtgaggataacagattttttttttttttttttgagatggagtcttgttctgtcaagcaggctggagtgcagtggcgtgatctcggctcactgcagcctccgcctcctgggttcaagtgattctcctgcctcagcctcctgagtagctgggattacaggcagtgccaccacacccagctaatttttgttgttgttgtatttttagtagagacaggatttccccaggctggtctcgaactcccgacctcaagtgatccacctgccttggcctcccaaagtgctgggattacaggtgtgagccactgcacccggcctgaggataacatagatctaaagccccttgatgtggagagttttttcttaaactttaaaggtaacggtattctccacactagcaggggcagaggaatttcagggagtgctctgattagtgtagtgtgatttcttgttcatccctgaaccatgaggaaggcagtgttgatggtaggggcgtggaatacaggtctctgattggctgaattgggtgggtagatggggcgtgtgcagtaaggcaacatgattgacagcttccccatgccctagtggagtcaggaagaagttccccaaaggtagtgggatggctgatggaggaaaaattttgccgggaagacgagagcaatgtgccgcacagctccaggggccgccattctcacagaatcacacagatatgtacatccttcttccttgcttaaaattcccaaactgcacctcagctgcccagtattaatacagtaaaacagacttacccatccctatgggagtcacctcagcctcagaggcacccctgtctccatcccattatctctggatgacgtggcttctgctgatttagtcaggatgtggcttctcaggagctagtagcctgtggccaaaggatacatttatttacccctaaattatacactcctattatatccacaattatgtactccacacagtatatggtggtccagtgtataaatatggaggcataaccagataattggaatctaatcattctacaaatattaactagggccccaccacgtgttggacctttgtttttatctctctaggtctcaatttcctcatctatgaaatgaacataatgccgtttgaggattcagaggcagtacacatcaaatgtttaacacaagtacctggcacccagcacacactcaataaataatagttgtgctgggcatggtggatcacgcctgtcatcctatgggaggccaaggtgggtggatcacttgagctcagggtctcactatgttgtccagcctaggagactagcctgggcaacatagtgagacactgtctctacaaaaagtacaaaacattagccaagtgtggtgtctgcctgtatcctagctacttgggaggctgagataggaggattgcttaagccgaggagcttgaggctgcagtgagctatgatcacaccactgcactccagcctgagccacagagcaagactgtctcaaaacaaaaacaaaaaactaaaaaaaaacccccacagctgttattagtgttccaccatgcctggtgaccctcaattatgtagttactgagttttttgtttttattttttttgagacagtctctctctgtgatccatgttggagtgccgtggcacaatctcggctcactgcaacctctgcctcccgattcaagcaattctcctgcctcagcctcctgagtagctgggattacaggcacgtgccaccatgcctggctaatttttatgtttttagtagagacggggtttcaccatgttggtcaggctggtctcaaactcctgacctcgtgatccacctgcatcggcctcccaaagcgctgggattacaggcatgagccacagcgcccggcctgagttttaagtatgttacattatatgtaggatgccaagaaaataagacatacttctttcccttccggaaaaagcaggccatttgggaaggcaagtctctcacttgtatagatcagagataatcccaagaagtgggtgccaaggcactcctagataagctgcccctgctcctagaaacctgattggttgcagtgaaggccagttgggaaagcaaccctattgtatgccctcagctatggagtcctcacagtcacggtcacagggtattgcttcattaagcttctctgctcttcttctccatgaatagactatctccccatcaatccaattctttgtgtgtgtgtgtgtgtgtgtgtgtgtgtgtgtgtgtttttaaatggagtttccctcttgttgcccaggctggagttcggtggcatgatctcggctcactgcaacctttgcctcccaggttcaagtgattctcctgcctctgcctcctgagtagctggaattataggcgcccgccactatgcccagctaattctttgtatttttattaattttgagatcaagtctctctgtcacccaggctggagtgcaatgccacggtctcagcccactgcaacctcctcctactgggttcaagcaattctcctgcctcagcttcctgagtagctgggattacaggcgcccacgaccgcgcccagataatttttgtattttcagtagagacagggtttcaccatgttggccaggctggtctcaaactcctgaccttgtgatccgcccacgtcagcctcccaaagtgctgagattacaggcctgagccactgcgcccagcctaattttttgtatttttagtagagacaggatttcatcatgttggccaggctggtctcaaattcctgacctcaggtgatctgcctgcctcagcctcccaaagtgctgggattacaggtgtgagccaccgtgcctggcctctcaatccaattctttggattctcagcaaacagtttgattgttttcaaaatctatcagagatgaatacatggtaattgactcattcaaaaatatatattgactgctggcttcaccagtacatatgccaaaaactggaacgatacagagattagcatggcccctgagcaagggtgactggcaaattcacaaagcgtttcatatgtgtatatatattgagcacctactatgtattacacatgcctataagcaaaagggaggcaggagtgagcaaggcagatattgactttttggttgttttttttttcaagatggagtcttgttctgtcatccaggctggagtgcagtggtatgacccgggctcactgcaacctctgcctctcaagttcaaatgattcttctgtctcagcctcccaagtagatgggattacaggcacgcaccaccacacccggctaattcttgtattcttagtagagacggggtttcgccatgttggcctggctggtcttgaactcctgacctcgtggttcgcctgcctcggcctcccaaagtgctgggattacaggtgtgagccaccgcactcggccccagatattgacattttgatgggaaagaaggacaataaacagaaatagatacacaatctttcaggaaatgatagagctctaaagaaaaagaaagcaaggtaagggggagcacagggacttaaaaatgtgtctgcaaattccttgacgctcctccctgcagaggatgaagctagtttccttctccttgagcatgggctggtctgcatgcccacatctagtgaacagaatacagccgagtgatgtaatgtcgcttctgagggtccgtttttgcccagctctctttctgtctcttgggatgcttgcccttggaatccagccaccatgttgagggaagcccaagccacaaggaagccacattagaggttctgagtgagtgacagcctcagctgcacttgggtgacaaagagcatgtgatctgtcctcagcctctgactcttttttgtttttgtttttttgaggtggagttttgctttttgcccaggctggagtgcaatggcacgacctcagctcactgcaacctccacctcccgggttcaagcgattctcctgactcagcctcccgagtagctgggattacaggggcgcaccattatgccccgctaatttttgtatttttagtagagacaggggttttgccctgttggccaggctggtctcgaactcctgacctcaggtgatccgcctgccctggcctcccaaagtggtgggattacaggcgtgagccaccgcgcccagcctagcctctgactcttaacagctgtagtcccaataattgtggacggagaaagctgtctccactatgccctttctgaattcctggctcacagaagccaggtgaaatgataaatcatgattattgttttaagccattcatcttggggataatcttttacacagtaaggaatagttaataaaggggagagggcggggcatggtgactcacacctgtaatcccagcactttgggaggccaaggcaggccgctcccttgaggtcaggagtttgcgaccagcctggcccacatggtgaaaccctgtctctactaaaaatacaaaaattagctgggcgtggtggtgggtgcctacagtcccagctacttgggaggctgagccaggagagtcgcttgagcccaacaggcggaggctgcggtgagctgagatcccaccattgtactccagtgtgggtgacagaatgaaactctgtctcaaaataaataaataaataaataaataaaagataaaggggcgagagactgaggtggaaggtggtaggagagtgagtgctaattaaacagggtggtcacggcagacctttttgatgaggggatatctgagcagagacctggatgaagcggggcagcaagtgacgtggatacagggcagaagctttcaaggggagagaagggccagggcaaaggctctggtgcaggaatgcgcttgtggttcagtacaggggccagtatggctggagcaatatggaagagaaacacagtggcaggaaataagatcaaaaaaaggggtgaggagaaattgcaggctatgtagacctttgcagggaattgagcagagaatgctgcaatatgatctcagctgaagttaaggctacttcggctgctgtacagaaaaatagcagttagtgaaagcatggaaggagggagaagccagctgggaggctacgatggttgtccaggtgagacatggacggtggccagcactagtgaggtggaggaagtgagaggtagtcagaatatggatatattcaaggtaatgctgattggactcactttttgatagaagcagggtatcagagaagcagaggctggcagagcggatgagctctaggcgggactcaatgtgtggaccatagaccagcagcatcagcagcatctgcatcacgtatgagaaatgaagactctcgggcgctgcctctacctactgaattttagcaagactaccaggtgttccccatgcacatcaaactttgagaaatgctattctaggttgctctcaagtctggctgcagatttgaaacacctggcaagcttttaagacacgtaccaacgctaggtctggaggtggaggggctgtttgttggtattcatattttttagctcctcaagtgaccctcatctaatccttggatccccatccagcctttccacaaactctatgggttctgaccttaaaatatagcccagtgttacagctcttttagaatttgtctagcagtctttccagtttttgccggaaagcccctctcacgcttaaaataataataataataaaataaaatatattttaagtctcacgcctgcaatcccagcactttgggaggctgaggcgggcagatcacttgaggtcaggagttcgagaccagcctggccaacgtggtgaaaccccatctctactaaaaatacaaaaattagcagggtatggtcgtgggcacctgtagtcccagctcctcaggaggctgaggcaggagaatcgcttgaacctgggaggcggaggttgcagtgagctgagatcgtaccacggcattccagcctgggtgacagagtgagactctgactcaaaaaaaaaaaaaaaaagagatgaggtcttgctatgttgaccaggctggtctcgaattcctagcctcaagtgattctgctgcctcagcctcctgagtagatgggactacagttgtgagccacagtgcctggctcccaccctcatttatgttatttttggattgagttttccttttggtgtacagtttttgtttatttgtttgttttttctgagacagggtctcactctgccacccaggctggagtgcaatggtgtgatctcagctcattgtaacctcggcttactgcaacctccgcctcctgggttcaagtgattctcctgcctcagcctcccaagtagctgggattacaggcatgcaccaccatgcccaactaattttggtattttttggtagagacggggtttcaccattttggccaagctggtctcaaactcctggcctcaagtgatccgcccacctcagcctcccagagcctgggattacaggcgtgagctgacgtgttttaactcatctatcaatttgtgttactatcaggaggcagaccagttccggcactctgaagagctgccatgggacaccctttttataaccacaccatccttctacacctaagtgaagatctggtgctgggattacaagggcaggatgagtgaactcaggtgtgatgattgaagacttatgggccaagagacccagcaggtcaagatagagacatttttccaacctcaatctagaactcaatgaggatagcaaatacatttcatctgattgtgcccactccacccaactgcctggcaggctggattgtgaaggactctaatgcatatcagggctcagctgaagagtgtaatggttgattagtgatgcctcttgtggacacaggccaatgggagggggtgcctgtgctggagagtgttgttagtgtcggggctgattgtctaccaagagggcggggaacgccctaggggaatgggagagaaagccgaaatcagacacccatacatatttttttttttttgagatggagtttcgctcttgttgcccagggtggagtgcagtggtgcaatctcggctcactgcaacctctgcctcctgggttcaagcgattctcctgcctcagcctcccgagtagctgggattaacaggcacccgccaccactaatttttgtatttttagtagagatggggtttcgccatgttggccaggctggtcttgaactcctgacctcaggtgatctgcccacctcagcctcccaaagtgctgggattacaggtgtgagccaccacccctggcccaatatatattggatattagatctgagatactccatctttggaatgtttataccatctgtcttcagttgtgctcagtaacaagaatcatgacttccttataaatgcataaaatctcagggagacagagaattatgtctgtgtgaggatttacagtagtgcttaaaaatcccagattgattacaagctatcccagatggcttcaaacacaacaatactgaaaggaagcaagtttatcatcaaagagaaaactaggaagcaactgtgggaaatcacagtttgtctagataagagaagtctacaaagaggcagcaggaggcatttgaactgttttgtattcttattgtagtggtggttacacaactctgaaagtatgttaaaactcatagaacgtacatacatatataaagtcaataatttaaaaatctaaaatctatttagccatgaaatatgatgctatagaacttggtttgctgctgggcatagtggctcatgcctataatcccggcactttgggaggccgaggtgagtggatcatgaggtcaggagttcaagaccagcctggccaacatagtgaaaccctgtctctactaaaaatacaaaaattagccaggtgtggtggcgcatgcctgtagttccagctactcgagaggctgaggcaggagaatctcttgaacctgggaggcggaggttgtggtgagccgagatcatgccactgtactccagcctgggcaacagagccaaaaaaaaaaaaaaaaacattaaaaagttggtttgccaaaatgtggtacacacagagctggttgtacacaagatgatataagacgaaacgtagatgaacatttgaattgtgtagttatgtatttgcattaattcatattagaagaatgtctagtttatcaagcctataacttcaaaaagacaattatataaggttaggctaagtagaaatttgagttgctttaaaggaaaatataaagtaaataattatacaggttttatgcatgtagacaagatttttgatcggggtatgggaataaagttatttgtctgaaaatcctaccttgactgagtgtggtggctcatgcttgtaatcccagaatttgtggggggcggccaagacaggaggattgcttgaccccaggaatttgaggccagccctggcaacacagtgagaccctgtctctacaaaaaaaatagaaaaattatccaggcgtggtggcgtgtgcctgtggtccctgatactccagaggttgtggtaggaggatggcttcaacccaggaatttgaggctgcagtgagctacaactgtgctactgcactccagcttgggtgacagagtgagacccaatctcaaaaaaaaaaaaaaaaaaaaaaaaaagtcctactgttatagagtttataatctagcaagtgcagaaaaacagggatattaaaagattatgaaataattttaaaaatcagttaccaacgcataacactgtgaatgtatttaatgccagtaaactgtacactttaaaatggttgaaatgctaaaatttatgttatatatattttaatatgataaaaacccaatttccaaacatatattaaaaatgatgccatgcccgggtacagtggcttacacctgtaatcccagcactttgggaggctgaggcaggtggatcgcctgaggtcaggagttcgagaccagcctgatcaacatggagaaattttgtctctactaaaaatacaaaaattagctgggtgtggtggtgcatgtctgtaatcccagctacacaggaggctgaggcaggagaattgcttgaacccgggaggcggaggttgcagccgttgtacttcagattgggaaatcgtgccattgcactccagactgggcaacaagagtgaaactcagactcaaaaaaaaaaaaaagatgccatttttgtaaaagacatgcacatgtctttcttatgcataggaaattggaaggatggatagctacttttatacataggaaattggatagaaagataatactggtggctgggcgcagtggctcatgcctgtaatcccagcactttgggaggccaaggcaggcagatcatgaggtcaggagatccagaccatcctggctaacatggtgaaaccctgtctctactaaaaaaatacaaaaaaattagccaggcgtggtggcgggcgcctgtggtcccagctactcgggaggctgaggcagcagaatgcatgaacccgggaggtggagcttgcagtgagccgagatcgcgccactgcactccagcctgggcgacagagcgagactccgtctcaaaaaaaaaaaaagaaaaagaaaaaagaaaagaaagataatacttgtcatttttggataagattctgactgattttttttttttttttttttttgagacagaattttgttcttgttgcccaggctccagtgcaatggcgcagtctgggctcactacaatctctgcctcccgggttcaagtgattctcctgcctcagcctcccaagtagctgggattacaggaatgtgccaccatgcccagctaattttttgtatttttagtagtcatggggtttcactatgttggccaggctggtctcgaactcctgacctcgggccatccacccgactcagcatcccaaagtgctgggattacaggcgtgagccatcattgagtgatttttattgtttacttaccttgtccaacatcttatagaatacatacgtattaatttacaataaggttttatttaagagacttttttttttttttggagacagagtttcactctgttgcccaggttggagtgcagtagtgcaattctcggctcactgcaacctctgcctcccaggttcaagtgattcttgtgcctcaacctcccgagtagctgggattacaggcatgcaccaccacacccagttaatttttgtatttttagtagagacggggttttgccatgttggccaggcttgtctcgaactcctggcctcaagcaatccacctgccttggcttcccaaagtgctgggattacaggcatgagccactgtgcccggccgacgtttctgtgattttttattgaatggccaaaaaaaggagggaaggagggaggggtatcctggggaggtcaacggaaataaaaccaaaataagatttgaaaaaaggaaaccactaaaaatgcaatgtggcatcttagatcctagaacaggaacaagacattagtggaaaaatcagtaaaatccaaataaagtctagaggtcagttaacggtattttactaatgttcatttctcagttaccgtggtatgtaagatgtcaaaatctggggaaattgagtagagagtatgtgtgaactcttaatacaatgtctttgtaactttttggtgaaattaaaattactccaaaacaagaaatgtattttaaaaatttaagtttagaggttggaatcatctttttcctcttcagtttatattactgtcattaacaatagccaccaatgactaatggctaactttggaatttccacaaatagcaggagaaaaccatttggggtaggcaactattgaaaagttacatttagatagtcccaaaacaaaagagagagatttgcaaattcagaggtgattttctgttttcttttttttcttagcgttctataaaagttcagtgacgacttttagaaattctcctttggatatccttagcttccagggccggaaccagcaccctctagccttctatgactcaatccatgcatatagattaggggccagatactctacttgcatttccagaaatatgaggggggagtacttcccaaggagaggatgtagtctctttgaaatttgaccctttaaaagttgggctgctggacattaataaggaagaattgaaagtgcagatcaataagacttgctgaaaataaaacacacattagcatagagtgttctccctataaccaagattaatgcctttttaaaccaaaccagagcacaaaggtatatctttgaggctaattgccgctagcagattgcagagagaaagaaagacaggcttgggggcaggggctggtggacaaaacccaattgcagaactcctaagagcaggagtgaaatgaaataaccccttgagttatgcagagaatttaaccagcgctgggctcggttttattgggcatgcatttgaaatttaaatacgttctggggacaatgcctttttacagcatagccaggagcttgccaaataggagcacagcaagtttattaacaagaggacatgatcaaacataaaatagcaggctaaggactccttttcttgtacagccacgctgaaaagacttctgtggaattccaatcctgctctcgacacaccccttgtctaggactgtatttactcaaacagccaccctcatttccttttaaaatttatttgtcattagccattactcactgcaaagctactttttgagattttaatatcccttttaataaggcactattctttgaaaactacaataccaacatttttgttggtacagtgttttttggtatttgaaaaactatgaaatcagaagaacttatggcttgagatagtcccagatgcataaataccctaaatcaaatgggcacttgtttagaatgctttctaaggatgttcctcacccatctaaaacccttccaacatatcgcatcatggttaagcaggtagaatctagaatatgattgtctgggtctaaacccaggcctcctccaccttggccttgggcaagttccttaacatttctgtacctgatgtcctcatttctaaaatggggctaataatagtccccacctcatagggttgttttaagggtatacatgtgtgtatacatacgcgtgtacacatgttgcatatgtatatattgcacatgtaattgtgtgtgtgtgtttatatatagatatgtgtgtgtgtgtatttatatatagatgtgtgggtgtgtgtatattgtacttccaggagaattctcaataaatgggagctgtggttgttttagctttttattgtattatggctgtgaggcagagcttgtgttcctgtgttttttccccaggggtggtttggccatggaaatgaacggggtggcaggtgatgctggggagaccaaggaaagcaggaagagtgaggttgggagcaagagaaaagaaggacgggaggtccagtctcagctccttgcccttctcctgccatctcactagcctcttaccccaggcttagtctctcagctcttcccttcgttttctcctgagttgatccattttcttaaagtctgactgtctttcctaacaatgtattagaaaataaataataaggccaggtgcagtgtctcatgcctataatcccagcgcttgggaggccgaggcgggcggatcacatgcagtcaggagttcaagaccagcctgactaacatggtgaaaccccgtctctactaagaatacacaaattagccgggcatagtggcaggcacctgtaatcccagctactcaggaggctgaggcagcagaatcgcttgaaccccggaggcagaggttgcagtgaactgagatcgtgccattgaactccagcctgggcgacagagcaaaactctgtctaaataaataaataaataaacaaataaataaataagcaagctggctgtggtggcgcgtgcctggagtcccagctactcagcagctgaggcagaagaattgcttgaacccaggaggcggaggtggcagtgagctgagattgcaccactgcactccagtctgggtgacagaagagactccatttcaaaacaaacaaacaaaaaacccccaccaaactcctggtcaacctcaaatctgcattcttacaggattcacctgcttggctcctggcaactctatcccaccactggcaaaacaacggacaaacaaataaacaaaaaaacaggagatttctttgacttttcgatttctctgctttcccatccaacccagccatccatcttcatcgttaaaacggattcggaatcagacccttctctccatccccactgctcccatcgtggtccaaatcgggacgtggtgctaactccccagctgcctcctgccccatgccctgttcttcacacagcaggctgagtgatgccacggaagtgcaggctggactacatagctcacgtgcagtctcagctgacgcccgaatccccacaatctctgcctcccttgactcctgaccacagctaccctactttctcccccctggctggctcctccagccacaccagcctccttactgctccacgagtcccccaggaggctctgcctttggaccttggcactggctgtgccctcggtctggggcaattcccccatattccatgcccctctcctcccttgctctgtccttccttcaaatcaccttcattggggtgaggtggctcatgcctgtaatctcagcactttgggaggccaaggtgggcagatcacttgaggtcaggagttcaagaccagcctggacaacatggtgaaaccctgtctctactaacaatacaaaaaataactgggcgtggtggcacgcacctgtaatcccagctattcgggaggctgaggtgggagaatcgcttgaacacaggaggcagagattgcagtgagccgagatcacgccattgcactccagcctgggcgatagagtgagactcaagtctaaaaaaaaaaaaaaaaaaaatcaccttctctgtgaccttcactgacctccggatataaaatgacaatccttacccatcagcactggttcctctctctacttttttttaaatccatagcatttaccactatctaacacattatacattttacttagataattttgttgattatctcctttcccttaccaccccccagcccccaccccatgtgagcaccatgagattaggggctttcttcattcattgctctatctcctgtctggaataatgtctagcacatggcagagctcaagcattatttgctgaatgatttaatatctgtctacttgactactaccatctattcgaatactcaaagtcaggggctgtacatgtttgtgcttactccaatggctggtgcatggcagtcgtccagtacattttgttgggtgactatacatgggctttgtagggcatctgcttccttctctgcaataggagaaatggggagtgctgattagaaagtctgccgggcgcggtggctcacgcctgtaatcccaacactttgggaggctgagacaggtggatcacctgaggtcagaagttcaagaccagcctgactaacatggtgaaaccctgtttctactaaaaatgcataattagccaggcgtggtggcacatgcctgtaatcccagctactcgggaggctgaggcaggagaatcgcttgaatctggaggtggaggttgcggtgagagagatcacgccattgcactccagcctgggcaacgagagcgaaactccgtctcaaaaaaaaaaaaaattaaattaaaaaaaaaatagtaagcccaatcctgcctatgggggcagctttcccttggccccagtatggcggcttttgcctataatcttagcacattgggaggacaaggcaagaggacagatgaggccaggagtttgagaccagtctcagcaacatagtgagactctgtctctgcaaaaaaataaaaaaataaaaattagccaggtatggtggtgtgcacctatagttccagctacttgggaggctgaggtgggaggatcgcttgagtccaagtgttcgaggctgtagtgagctgtgatggcatctttgtactccaccctgggtgacagagtgagaccctgtctcaaaaaaaagaaaaaaagaaaaaaaaaaaagaaagagagaaagagctttgtttcctgcataacaaaccacctcaacacttaatggcttaatacaaccacctatgtatctcataattgtgcaggctggtgaggcaggtcttccggtgtggggcggctcagctgatctcttcaaatcaaataatcctcccagtcaacacagattaaaattgaaacccctggcaagcagagggcttttgtattgaaggaggaaaactcaccatcccacaaaaggttggcatgaaattaaggtgacaagggaaaaaagggccatgagctactggccaaataattcagcttaatctccaggaaatgattgtcatagccttaggaaggtacatgtgcagatttggagaaccctggctgaaagagccaggcggcctcggaaacaaattcacattgcatgcgacatgcccaagggcagcgggctctggcttcaatcatgactatattacaggaatggaaatgacaaatgggtttgggagtggcagacatctaacgatgattacagagaacaggaaccgcagaattaggatgcacccacagtcacttttttttttttttttttttttttttcagagacaggatcttgttctgtcgcccagcgtggagtagcataatcatagctcactgcagccttgaactcctatgctcaagtgatcctcctgcctcagcatcccaaaatgctgggattacaagcgtgcaccactatgcctggctaatttattttatttcattttttgtagagattgagtctcgttttgttgccccggctgatcacagttacttttgagtatatataatcagtggctatcaggaacacaagaggcccagttacttccatttcttgagattttctgtatattaaaaaatttaaaaggggatattctgtgtgatttattatcaaaactgtgtgatatgttaaatgtgtacagttttaaatcataacttttaacaaacccccaaaaaaggcaaaacaaaacaaaacaaaacaaaaaaaccctaaaaaaatgcaacataattgtgctagtcaaagataatatatatatatatttttgagatggagttttgctctctcgaccaggctggagtgcagtggcacaaccttgggtcactgcaacctccaccccctgggttcaagtgattcttgtgccacagcctcccgagtagctgggattacagcatacaccaccatgcccagctgaattttggatttttagtagagacagggtttcaccatgttggccaggctggtctcgaactcctgacctcaagtgcctgcctcggcctcccaaagtgctaggattacaagcgtgagccaccgcgcctggccaaccaaagatagttttaagaaacattaattcatttgtgctgtacactgtggtccagtgatgagacccacgtttaaaattgtacaaaatcggctgggcgcagtggctcacgcctgtaatcccagcattttgggaggccgaggcgggtggatcacaaggtcaggagatcgagaccatcctggctaacacggtgaaaccctgtctctactaaaaatacaaaaaattagccgggcgtggtggcgggcacctgtagtcccagctactcgggaggctgaggcaggagaatggcgtgaacccgggaggcggagcttgcagtgagccgagatcgcgccactgcactccagcctgggtgacagagcgagactccgtctcaaaaaaaaaataaaataaaataaaataaaataaaataaaaataaaaaaaatatatatatataataaaattgtacaaaaccttcctgatgatgaaatattgtacagagcaactggcctgagctcttcaaaaagttaatgttgggccaggcactgtggcttatgcctgtaatcccagcactgtgggaggccaaagcaggaggactgcttgggtccatgagttcaagaccagcctgggcaatatagtgagatcctctctggcttccttaatttagtataatgttttcgaagtttctctttattgtgtcacagaattcctgccaggcaaggtagtttatgcctgtaatcccagcactttgcgaggccgaggcaggaggatcgcttaagcccagaagttcaagatcagcctggataacatagcaaaaccccatctctaacaaaaattaatttaaaaaattaattaaaaaaaaaaagccaggtatggtggcacacacctgtggtccatgtgggagcctgaggtgggaggattgcttgagcctaggaggcggaggctgcagtgggctgtggtcacaccactgcactccagcctgggcacagagagagaacctgtctcaaaaaaaaaaaaaaaaaaaaaaaaagttattgtcattaaagaaaaaaaaagcagggtggcaggaagagctggtctagattttatttttatttattattattttttgagagagagtcttgctctgtcacccaggctggagtgcagtggcgtgaccttggctcattgcaacctctgccttccaggttcaagtaattctcctgcctcagcctcctgagtagctgggactataggcgtgcccaccatgcccagctaacttttgtatttttagtagagatggggtttcactatgttggccaggctgatctcgaactcccgacctcaggtgatcctcttgccttggcctcccaaagtgctgggattacagacgtgagccactatgccccgcctggtctagattttaaaagagatacaggacagccaggcgcggtggctcacagctgtaatcccagcactttgggaggctgagccaggtagatcacctgaggtttggagttcgagaccagcctgaccaacatggagaaaccctatctctaataaatatacaaaaattagccaggtgtggcggtacatgcctgtaatcccagctactcaggaggctgaggcaggagaattgcttgaacctgggaggcagaggttgtggtgagctgagattgcgccattgcactccagcctgggcaacaagagtgaaactccatctcaaaaaaaaaaaagagagagagagagagacaggacatgtaacaaccacatgcaacgtgtgggccttgattagatcctgctttgaataaaccagctgtaaaagatatttctgggaaaaatgcagttgtttgaaaaagtcctccctattgttttggagatacagcctgagagatctagtgacaaacattcataaagtctataatgtgaaatcttcaagggaaaaataaatgattaatgaagcaaatacggcagcatgtgaaccatgatcctatctaggcaatgggtgcatgcatagagatagaaactgctgtctgtgcttttctacatgcttgagaattttcataataaaaagtgaaaatagaacacagaacactcaggagcttaggataagcatttactgtatgtacttaatatagtcatctgtattataaatgagagtgattagaagataacaggaatattttgaggagaaaaaaagggcatgaggaatgtcatcttcccatcttcttaccagtgtttctctgtgactctgaggatgacctcatgtggagataatgtcaaaagtccacattttagaccctgcatctgaagacagggtcaaatggcttccttgatctccctgtgataggatggggtggctattgtctttttcttccttcattttgccctcccggtgattctatcaaaactgagatattagaatgacccgacgggcccacccagcttcttataagcactctgtttactttccaaaatggaagagagaaggtgactttggagataaggaaagaagctgattaaccagttaaaccatttctgttagttcagtgatcaaatttcactgtattatttccaatgtgaatagttaacttcccggtgcagtcatatataaagaaggtaagttcagatagtaaatgaccatagttatattcccctagccagctccccacccctctctgatcagaaatcagtttcctgattgccctctgaaacttagtattagaatctagaagacactgttggccacaaacgcacgtcacagtagcaaacgctggattaattttatttttgatgaaggaattcctgaagaaccaaagtgcatggatgcaacgttttgcagccttctgcacagtgaaataccttagcatagcatcaaaccacggcagcttgtcactcagatctgggattcatggttatctggaactgactcagatcccaaaatgcaaacagtattttgaaacaccaaaaaattccaaaaagcttttaagataggtcccattctcaaactcactcaaactcatctacggagaaaagaatccatggctacgggagctgacaacaaaattaattgctttcaatttttataaaagttctcaaggaacttcaagagctgatgcaggtgggtggaattaaacattagcaagaagagctatattgattaaaaatttaaatgtctgacctatctctttatctggtttcagtgggctggcagggcggctctgtcaatcaagatagacctaacataacaataacatttataaacacataaaaattcatagaatgcacgtctacacttttctctgtagaattaaaaaaaaaaattcaatgaattttttttgagaaggagtctcgctctgtcacccaggctggagtgcagtggtgccatctcagctcactgcaacctccacctcctgcattcaagcaattctcttgcctcagcctcctgagtagctgggattacaggcacgtgccaccatgcccgggtaatttttgtatttttagtagagacggggtttcatcatgttggccaggatggtctctatctcttgaccttgtgatctgcccacctcagcctccaaaagtgctgggattacaggcgtgagccaccacacctggcgtgaatttgttttttaagggacacaaggaaagttaatagttactagcctaatattgcattccctgcatatgaaatctttattctgctaatgtaaaattcaaacatagcagaagcagaaggaaaatcatgtcatagaagcaattctttcagcacagttaaaagttgggaatcaatgaatactgcagactcctgccatgtagcagttaataccagagggtggcaaactgaggccctcgggccaattctgtctttgcaaataaagtttccccgagaaacaggcaagcccatttccctatggattgtctgtgggggcttttgtgctgcaaagacagagttgagtagtttaggcaaagaccacttgatctgtaacgcctcacgtatttactatctggcctttactaaaaactgtgttaataacatgaatgttggagtcaggcaggtccagattgaggatccagctctgttcagctgtatgtccttgagcacattccttaagattttcaaatctcagtcttcctacctattaaatgggagtaataagaaaaataatagctaaatttactgaatgtttacaatgtgcccagcactgttcaaggtgctttgaatgcagtaactcatttaaactcacagcaaccctatgaagaacacactatgcttgcccgggcatggtggctcacgcctggaatcccagcactttgggaggctgaggtgggtggatcacctgaggtcagaagttcgagaccagcccggccaacatggtgaaaccctgtctctactaaaaacataaaaattagccgtggtggcacacacctgtaatcccagctactcaggaggctgaggcatgagaatcgcttgaacccaggaggtggaggttgcagtgacccgagatcacgccactgcactccagcctgggtgacagagcaagactccgtctttttttttttttgggtagggggatggagtctcgctctgtcacacaggctggagtgcaatggcatggtctcagctcactgcaacctccgcctcctggattcaagcaattctcctgcctcaatctcccaagtagctgggactacaggtgcgtgccaccacacccagctaatatttgtagacacggggtttcactatgttgactaggctggtctcgaactcctgaccttgcgatcctcccacctcagcctcccaaagtgctgggattacaggcatgagccaccgtacccagtgagattctgtcttaaaaaaaaaaaagatattactgtgcttgtccccattttaaaggtgaggagacaggctcagagagctgaagtaacttatctagagtcccacagccaggaagtggtagagctacaacctcatctggtaattataagtgtaaagtgagattaggcctgcaggaaacatgctttaactggtgcttgtaatatagcaagctttcaaaaaattagatctgtttgcacgtggtggtgcatgcctgcagtctcagctacactggaggattgcttgagcccaggggtttgaggctgcaatgcgctatgatcacactgggcaacatggcaagaccccatctctaaaaaagtaaaaagaaacaaaataaattatatctgttgctattactaatttggaacataagccatcagaaattaataaatgaatgggaacctgagctgacccttcaaatcttgacttcatagcatgtttatttaactgacatcttcaggggggcagctaccatgtcaaaatggtgtttgttgttctggggaaggtgatagattacgcagagtttgctttccttggtctctggattaattgtcagttttttaaacaggattttgacacgctaagatctcccagaaagtatgccattaaactgaagaagaagaaaaacaagaaacctcatagaggtgagactagaagctgagtgtgtacattttaccaccgcagtttgctggtcacttatggtcagttggttcacatacaaaccacaacaaacacatgcatataatgaaataaattggcttcttgaaccgttttactttctttataacttaaaaatacataagtcgcatgttgttggagaaagtgcagatataaacaacaggaaatagaaaaataatcacccataatcctaccttgaaataaccatcttttttttttttttttgagatgtagtcttgctctgttgcccaggctggagtgcagtggtgcaatctgggctcactgcaacctccgccttccggtttcaagcgattctcctgcctcagcctcccaagtagctgggactacagccacgcgccaccacgctcagctaatttgttgtattttttagtagagacggcgtttcaccatgttggccaggatggtctcgatctcttgacctcatgatccgcccatctcagcctcctaaagtgctgggattacaggcgtgagccaccgtgcccggctgaaataaccatctttaacccacgctggggatctagttttgtttaaatatgggttttgttttgtttgtttgtttgtttcctccactgcaggaatggtttcaatggatcacaatgtaaagcatttaaataaatgatggtaactcactggaaacagtgatgatccgagaggcagactgagagatctccagcctctatgttgtatatttctggactctttcaccaaaactactttttttcaccaagtctaactctgtttaagatgagaaaaaaacctaataaggatccatttttgagttaaaaatgtaatgattagaatgaatttggagcaaatatttaaattgccaatatcagttccaaatgtctttctttaatcggcagagcagtccacatacacgtttgagtatgtattttcatggacatctggaaagacctgtcattagctaagtatcccccaatgagatggagcagtcagatggtgtccacgtgcctctaaaacaacttgtcaattcaataagaaaaaaaaaaaaatcccaatccaaccatgcagtcaatttagggtcaaattatcagtcaaccatttgtcatgtaatccaaacaaatggtcacctaagtaaatctacattttaattagttatgcttatatcacatagatactgtcaggcaagactttcggtagcaaaacaaaagaccatgaaatttgcaaggaggtatttccaatcgatcctccgtaagacccactcaggggtgaacacacaggtttgtattcatcttaggccgtgattattggaagaaagaaattaaatatctataggttggccagacaaggtagctcatacttgtaatcccagcactttggaaggccgaggtgggtggatcacctgaggtcaggagttcgagactagcctggccaacatggtgaaaccctgtctctactaaaaatacaaaaattagtcaggcgtggtggtgcatgcctgtaatcccagcggctcgggaggctgaggcaggaaaatcacttgaaccccagaggcggaagttgcagtgagcagagatcgcgtgattgcactccagtctcagtgacaagagtgaaactctgtctcaaaaacaacaacaacaacaacaacaacaaaacccaaaaacaacaaacaaaattagccgggtgaggtggcgcatgcctgtaatcccagctacttgggaggctgaggcaaggagaatcgcttgaacccaggaggcagaggttgaggtgagccgggatcgcgccactgcactccagcctggggacagtgcaagactctgtctcaaaaaaacaaaaagatctcttgatgaggtgctcaggtaagaactgccctggtgtaaggtctcttgagttgggatcccagctctgccatttactagctctgtgtggctgggcaatttactcatcttctctgggcttcagtttctctctctgtaaactggggagtataatagtatccatctcataagcttattgtgcacactggagtaagtcacctacataatgcccttagaagggtgtgatttaaatccaacaagctcagaaaaccaaactttaaaaaactactttgatagccaaagctcatctgatctgaactcatttgctggcaaaacttgagctgaatcggcacaagagaatttctatgaatatccatagtttttgctgcagaaatagcaatgtgtttgatggtgctatgtagacccatactgatatatggtataagcactgtattatctttctaagtggaaacatgttgaattccaaaattcatggcattaatgaacatgtatttctcttgctataaatatgactttttttctttagttgagtttccaactaatgatttcatctgatcctcatgagtcaggtaaggcaggcatgatgacctcctgcttaataaatggagatattgaggcacagattcccaacttgtcaggcaacttgtccagactccaaaacaaacaagactaacccagttaaggaacatgcctatcaacactgcaggatccccaggaattagtagcaagggtattgtcatcggctatttaaaaaaaaaataaattaaattagccaggcctggtggcacataccttaagtcccagctactctagtcccggctagtctggaggctgaggtgggaggatcacttgagcctgggaggtagaggttgcagtgagctgagattgcaccactgcactccagccttggcgacagagtgagaccctatctcaaacaaacaaacaaacaagcaaaaaacacaacaacaacttattcatttatttatttatttagagatggaatcttgctctgtcgccaggctgaagtgcagtggtaccatctcagctcactgcaacctccgcctcctgggttcaagcaattctcctgcctcagcctcccaagtagctgggactacaggcgcacgccaccacgccaggctttttttttttttttttttttttgtattttagtagagacagggtttcaccatgttgcccaggctgttctcgaactcctgaactcggcaatctgcccgcctcggcctcccaaagtgctaggattacaagtgtgagccaccgcgcccggccaataaatttaaatcttagggttaaaatcaaggtggtaagagtcagtgaaacacactatagactctatttcctctcagagtcttggtaaaaatgagtagcagcagcggtcataatgatcaaagccattatttactgagcacttgctgtgggccaggcatgtgtgtgatctcatttaacagaaggtagcttctattattatccccattttacagaggagaaaactgaggcccgggcaggttaaggaggatacacaaggctgtagagttagtaaatggcagagtgaggatttgaacctggtgctatctggcaaggcagaacctctgtcaactaattctttgcctccataagcttctccgtattcagagttttatccttttttgctgaaatcacatttcattccactgaccttttcaaaggcttttgtctaaaaggttagaagtaattccacttctgggaactgattctcagaaatattcagagatatgaacacagatttatgttcaaaggtatttagcatgacattatttatagtagtctaaaaaaaacagtgtgagagagattaaatggtgaacattgtacatttcttataagaaaatattatgtaatcataaaaacagaattgttgaggcctggcatggtggctcacacctgcaatcccagcactgtgggaggctgaggtgagatcgcttgaggccaggagtttgggcaacatagcaagacttggtttctacaaaaaataaaaataaaaaattagccaggcatggtggcaagcacctgtagttctagctactcaggaggctgaggtgggaggattgcctgaggccaggagttcgaggcttcagtgagctgtgatcgtgctactgcactctagcctgggcaacagagaacggccctgtctctaaaaataaataaataggctactcagggcacactgcccatagggtagccctgctcttttactcttaatttttaaggagcagttaaatataaataaataaataaaaaataaatagaattgttaaatagcttagtattctaaggagatgttcataatatatggtgagcttttaaaaagggatacaggccgggcacagtggctcacgcctgtaatctcagcactttgggaggccaaggcgggcagatcacctgaggtcaggagtttgagaccagcctggccaacatggtgaaaccctgtctgtactaaaaatacaaaatttgcggctgggtgcagtggctcacgcctgtaatcccagcacttcgggaggccaaggcaggcggatcacggggtcaggagatctagactatcctggctaacacggtgaaaccccatctctactagccgggcgtggtggcgggcgcctgtaatctcagctacttgggaggctgaggcaggagaattgcttgaacccggaaggcagaagttgcagtgagccgagattgagccattgcactccagcctgggcaaaaagagcaaaactccgtctcaaaacaaaaaacaaacaaataaaaacaaacaaacaaacaaacaggatacaaggccaggtgtggtggctcacacctgtaatcccagcactttgggaggctgaagtgggcagatcacttgaggtcaggggattgagaccagcttggccaacatggtgaaacctcgtctctactaaaaatataaaaactagtcagatgtgcttgcctgaacccaggaggcaaaggttgcagtgagtcaagattgtaccactgcactccagcctgggcaacagagtgagactctgtctcaaaaaaggcaattcagtcttttagcaagaatggttgcttgaggagttgaggacgttaccttttggcccacaaagtctaaaatttttgtttgtttgtttttgtttttgagatggagtctcactctgatgcccaggatggagtgcagtggcgcgatcttggctcactgcaacctctacctcccgggttcaagtgattctcctgcctcagcctccggagtagctgggactacaggtgcgggccaccatgcccagctaatttttgtatttatagtagagacggggtttcaccatattggttagactggtctttaactcctgacctcgtgatctgcccaccttggcctcccaaagtgctgggattacaggtatgagccaccgcgcccagctcacgaagtctaaaatatttactctctgggccttgatggaaaaaagtttgttgagccctggtatataacaaacaaaccaaacacctcttgtggctacattgggcccactcaaataacccaggatatctcattcagttgattagcaatcttaatcccatctgcaacctcaatcccgccttgctgtgtaacataaccttgtcccaggttccttatacatgggagaggaaggcaggggagtccgtgtcagagggatgcggcctgagagactccaccgtcattgttggccctgaaggtggacagggcgatgagccggggcaggcaggcagcctctaacagccggaaaagggaacgaaaggaattctccactacagcctccacaagggaccgtcctgccaacgccttgattgcagtccgtgagacccctttggacttttgatctccagaactggtaagataataaatttatggtgttggaagccacctgtctgtggtaatttgttacaaaagcaacaggaagcagatacagctctggcgaattcaggaagtgagtaatggtagagagtggggaaatcaggaaaaacgtcaacaaagtcaaattaattattcggtggaatatgggactgtaattccattcattcattcaagcattaattcattcaacaaatacttattgggacactaggcctggtgcagtggctcatgccggtaatcccggcaccttgggaggcagaagggggtggatcacctgaggtcaggagttagagaccagcctggctaacatggtgaaaccctgcctctactaaaaatacaaaaattcacacacacctgtaatgtgatggcacacgcctgtaatcccaggtactggtgaggctgaggcaggagaatcgcttgaacccaggaagcagaggtttcagtgagccaagattgcgccactgccctccagcctgggtgacagagtgagactctgtctcaaaaaacaaacgaacaacaacaaaaaaacctccaaaaaaccaaaatacttattgggacacttaactttgtgcaaagacttcagctaggtttctgggatctgatggtgaaggggacaggctagcctgatcccatccccacggtgcctagagtcccgtgtgggaggaagacagttgaagagttaaccaggggattagtaaaaggtgatgaggtgatgagggggagtgggggggagggggtctcctgaggaagtgataatgatgcccagatctggaagacggctgtgctggccagggagagggtagggcaggattacaggaagtgggggcctgcagggagaggacagcagggggtactctgagggcctgggttatattccttcaccctctatctggggctcggagcatagtgggtcctcaggggaattagaagtaaggaggaaagacatgaaggagggaaggaaggtggaaatgaggaagggaagaaggaagtggaaatgaagaagggaagaaggaagtggaaatgaagaagggaagaaggaagtggaaatgaggaagggaagaaggaagtggaaatgaggaagggaagaaggaagtggaaatgaggaagggaagaaggaagtgagagagagggaagagggagaaaggagggaagaaggaaaaaagaaggaagaaagaaagtaaggaagaaagccgggtgctgtggctcactcctgtaatctcagcatgttgggagactgaggtgggcggatcaccgaggtaggagttcgagaccagcctggccaacatatagtgaaaccccatctcaactaaaaaaatacaaaaattaggccggacgcagtgcctcacggctgtaatcccagcactttggggaggccgaggcaggaggatcacctgaggttcaagaccagcctggccaacagggcaaaaccctgtctctactaaaagtacaaaattagtcgggcgtggtggcgggcacctgtaatcccagctactcaggaggctgaggcaggagaattgcttgaacccaggaggtggacgttgcagtgagctgagattgcgccactgcactccagcctgggcgacaagagtgagattctgtctcaaaaaaacaaaacaaacaaacaaacaaaaaccaaaaattagccgggtatggtggcacacacctgtagtcccagctacttgggaagctgaggcaggagaatcacttgaatcccagaggcagaggtttcagtgagccaagattgagtcactgcactccagcctgagcgacagggcaagactccatctctaaagaaaaaaaaaaaaaaaggaagaaagaaaaggcaggaagggaggaagggaggaagggaataaggggggaaaagacacatttaacctaactaaggaagaactggatacatgttgctaacatctgatacacactccatctccatctatgttgaccaaacagacttttaccccagttttgagagctccaagtctccaggataagctgtccccacccacaatctgtgagcctgggccttaagggaagatgctcactgcacctttctcaccttcccatgacatagggccctccacgggaagcggctgcagccatcacaatgcctcatcttgccattagtcatatttctgatctgctattctatgaaatgcccagaaaaggcaaatcttttttttttttttttttttgagacagggtctcattctgtcacccaagctggagtgcagtggtgtgatcacggctcactgcagcctggacctttcaagctcaagcgttcctcccacctcagccttccccgcctgcccaccccagtagctgggactacaggtgtgtgccaccacgcccggctaattttcatattttttcatagagatggggtttcaccatgttgcccaggctggtctcgaactcctaggttcaaaaaatctgcccaccttggtctcccaaagtgctgggattacaggcataagccaccacgcctggctgaaaaggcaaatccacagagacatagagtggatgaatggttgccaggggctggaggtgggaacaagaaggacagaaatgagggaaccttattagcatgatgaaaatgtttccaaaactgagttgtgaaactaactgcataattcagtgcatatacttaaaaaatcattgacctgtgcacaacaaaatgggtgaattttatggtatgtaaattataccacaataaaattgtttttaaaaattcaatttaaacacaaaatttcctggtttgcctaatccaaaatttatttatttatttatttagagacagtgtcttgctctgtcacttagagtggagtgcagtggtacaagcatagctcactgcagccttgacctcccaggctcaagcaatcctcccacatcagcctcccaagtagctgggactgcaagcgcatgccaccacgctcggctaatttttgtatttttttgtagagacagggttttgccatgttgcccaggtttgtctcgaactcctgggctcaggcgatccttctgcctcagcctcccaaaatgctgggattacaggtgtgtgccaccatgcctggcaaatttagtttctaaaatggtcacaggaatgatctgagttaacatagcattcattcattcagtcagtcgttcacgccacaaatatttattgagcatcaactatgtgccacacatagttctaagtagcagagaaacaatagacaacagtctcccactcttctgctgccttttggtactgacaggacccttgtgattacattgggcccactcagaacatccaagataatccctatattttaaggtcagctgattaacaaccttaattctatttgcttccttaatttccctttgccacgtaatataacatatttatagttgccagtgattaggatgtacacaatctctagggggccactattctgtctaccccactcgctattttgatagcctatagacacagctgtgtctccacatcccataattgtggattctttacagatattattttatgtagtctcataaggatcctaaaacgtgtatgccatgatctcaactttgcatatgaagagcatgaggctcagagaagtaaactgagtttcccaggatcacacagatacagtgtcagggttggggattaagcccaagtctgtggggccccaaagtctgtgagtttccagcaggctaagcttggctacgtcatgtttgcagaatgatctcttccatgtactggctgcactagaacagacagacacctcagttaattcaatggctcagccacgtggacttaacttgtggagaaaagtataaaggcagggcaaccctctggagacctcagttcaaatcccacctcagggaaatgacatcagctctttgggcctcagccagcttctcatggggatgctaaatcatccaggaaagctctgagtcatttgtacaagaaagattttaagctcctctatgtgccagactccattctagaaatttccacaacgctccataaaagcaggataaaaatcactcctttttatttgaaccatgcagataattttgccatcaagttatgttcatgataaaaaccatggccaaagctaccacggctttactgtgtgccagggacccagctctgggctttgcaaatatggacagttctgaatcacgattcactctaatagctggacttcaaaagaaacagcaaacttcattccccttattcaagtgtggatattcccttaatgaaatcccaaattaagatccaaatagctggtgatcataagaagaaccaccatccttactgtggggcgagaggtttctggcgggacactaattctcctcatttcccttcctggagttaagcctttgatctttcagttcacagatgacagggctgcctaccaatcaccaggaattgctgaagtgcctttctgtcttgctgagtacgaaggtgtgcagacactcagagccgccttgctcacgatccgattttatgagcattgaactgtgggtttggaagcagattgatctgcttttttgaagtcaaagctgtttgcctttgctgtgtactcattggaaagggagaaagggagctaggaatgttgataattgagtgtttttttctggggaatgactcctgcctaaaatctaggaagcccctccttgtgcgaggaagtcattgctgggactcaccatttggtgtgtgggttgcttctcaggatgaattttatgacaacaacaacagtaacaacaactgatttttagaagtttggggaacttgataactaagtgaagatgagaggaaaaagctgagatttgtgtccagcaaatagcttttccgtgatttttggaaaacaatctcagtcttttagtctagcctctacatttggtggtgatgggagggacagctagcatgaaaagctattaactcaagagcacttagaaaatgaattttaaggccaggcgcagtggctcacacctgtaatcccagcactttgggaggccaaggtgggcggatcatgaggtcaggagttcgagaccagcctggccaatatggcgaaaccccgtctctactaaaaatacaaaaattagctgtggcagcgcacgcctgtagtcccagctactcgggaggctgaggcaggagaaactcgggaggaggaggttgcagtgggccaagattgcgccactgcactccagcttgggcaacagagcaagactctgtcgcaaaaaataaaaataaaaatacaaaaattagccgggcgtcgtggtgcatgcctgtaatcccagctacccaggaggctgaggcaggagaatcgctggaacctgggaggcggaggctgcagtgagccgagattgcaccactgcactccagcctgggtgacagagtcagacctgtctcaaaaaaaaaaaaaaaaaagaaagaaaaatctaggctgggcacggtggctcatgcctgtaatcccagcactttgggaggccgaggcgggtggatcacgaggttaggagattgagaccattctggctaacacggtgaaaccccgtctctactacaaatacaaaaaaattagccagtcatggtggcgggtgcctgtagtcccagctactcgggaggctgaggcagaggaatggcgtgaacccaggaggtggagcttgcagtgagccgagatcgcgccactgcactccagcctgtgacagagagagactccgtctcaaaaaaaaagaaaaatctggaaacaatctgttcattaataagtccatcgttaattagttgacttcttagttcttcaatatccccatctgtagaacaaagatattcagaatacttattggctgatgatgaggactaaactagttaatgtgcagacagcgtttagaacaaggctggcacagagtaagttctcaatactctttgctattatatattattacaactcgatattagaaatgaacataaaaaaagactaaagttgatctatatgtgctgaaatgttcgtatttatggttaaggaaaaaacccaataaatggcagaatatgttgaatatggttgatcacatttgtgcttttcaagcaaggctgtgcctgtgacttgtatttactatgtaggtttatttgtatatagaacatttcaggaaggatacacaaaaattggtggttataaaggaatttctgtctagactctagagagttaatgttaaaacacagcaatctgtctacattctttcaaaagacatctgtcgactgccaacaattctaatttatggtttatggcacatatagaaatggagcaatttgagtcacaactgtctaatatggctttgtttgaaactagtgggtacgattaatctatgatttgaactagtgacaaaaagcactcataatatatgttttaagaaaaaagccatatggctctgctggccgaaaaccttttttatttttttttggagacagagtctcgctctgtcgcccaggctggagtgcagtagcagtgtcggctcactgcaatctccgcctcctgggtttaagtaattcttgtgcttcagcctgtcgagtagctgggactacaggcatgtgtcaccgtgcccagctaattttttatttctattttttgtattttagtagagatgggatttcaccatgttgcccaggctggtctcctacacctgagctcaggcaatctgctcacctcttcctcccaaagtgttgggattacaggcgtgagccaccttacccgattggaaaaccattaattttgaaaatgattgctatcaataaagtgtcgctttttggaataaaaagctatgaaacctcctggcttcgttttaaattatcttcggagtcaaatactagaaacaaattaatggcagaaattcagggaaatattttggcatcagattctataggattaattaaaagttgatatcaggcagttattgcttaaatgtcattttttatgcaaacaacataattgcaaaaatgagcagagccttatgtttgattttctctgcacatactgtcattcaggttcatacttgtcgagcattcatccatgcttactaaatattttttaattgtgtaaaacctgggtcattttacagatctgtttctgggtctgagtggttagtatgtcgccatagatctttctctccctgaccaaattctgctacttttctgaaatgtcttttaaatgttgttcattgcaaggttattatctttaatgaaaaaatgcctgctgagcggactacaaaccatttggttccctcctgtcaggggaggaaaagaataacattgaacaaggctgaaggtttttattatcacatcgtaaatgagcaaatggcatctgtcaatacaaagtgactcagaggtgcatggaaaaagaagttgtatggggaggctgtcgagtgacaacacggatttttattaacctcctggtccagcatctcttttcctattttattttgcctcattcactttgcaacataataacgctataaaaacactcaaacaggaagctgatcaccattaaaaactgcaggaccgccttgctactgagcaacagcaaagagtttggatcatagactatcttcagggttttatacttaagtgtgccgacgtgggtgtattttcacatgcagcccctgcctgctttgggtctttttgagaagatatttctttccaagaataacacagcctgtttgcctaagtgttaattctcacaaagttttcatatttgggtcataaacatccttcacgacactggtaaaatggccaaggtgtttatgggctgcaagaaatgtttatgccaatgcataaaggcagaaatggaaccgttcacatcagacctgaaatgagctgccctggagtgggggaaggggagccagaagcccaccccctacccccaacgaccccccaatgatttcgctggaagttgttaaggtggatgtctcataaaaatgttttgtaaatgttaacagcgattcaagcttaagcaggtgtgggggcagtgaaccctgggaggacaatgggaagagggaccggaagtcctgcccactctgaggggaagcaagtgctttcccttatgcccagggcagggcatggaggaggcctgggcacagagtgccagaaaatgccaaggctcaagttctgaaattctgacagttggggcccaccacgttgttcaatgaaatttaaaggctgggtatgaattgggtgatgacttccatgagaagtcaatagctacagtgcagatgttttagtgtcctaaagacagtgacaatatggtagatctaaatatgttttgacacagaaagatttccacaattttttttttaaatagagacggggatttgctatgttgaccaggtggtctcgaactcctggcctcaagcagccctcctcccttggcctcccaaagtgctgagattacaggcatgagccactacgcctggcctcttccacaattttttttttttttttgagacggagtctcgctctgttgcccaggctggggtgcagtggtgctatctcggctgactgcaagctctgtctcccgggttcacaccattctcctgcctcagtctcccgagtagctgggtgtcaggcacccgacaccacgcccgactaatttttttttttttttgtatttttagtagagatggagtttcactgtgttagccaggatggtctcgatctcctgacctcatgatccacccgcctcggcctcccaaagttctgggattacaggcgtgaaccaccgcacctggcccacaattttttttttaaagcaaattttagccaggcacagtagctatattcctcagctactcaggaggctgagatgggaggattgctttagcccagaagttggaagccagtctgggcaacatagcaagacctcatctcaaaaaataaaaaatttccagcttagaagatcctttattgttgttttaaaaaatagcatctacacagagaaaataacctggggaaaacagcccaaacatcacaatgggtttgaatgttctctactttgtatttctgtgttaattgttttttttttagaggttatgtagagataaaatgtcatagatctatgtgtaaggacattaaaaaacaaaagtgcggccaggcgcggtggctcacgcttgtaatcccagcactttgggaggccgaggagggtggatcatgaggtcaggagttcgagaccagcctggccagcatggtgaagccccgtctctactgaaaatacaaacgattaaccaggcgtggtggtgtgcacctgtagtcccagctactcaggaggctgaggcaggagaattgcttgaatccagcaggtggaggttgcagtgagctgagatcgtgccactgcattccagcctgagtgacagagcaagactcatctcaaaaaaaaaaaaaaaaaaaggtgagtgcatccgattatggcctgtagccttgttgactgtattgtgtcattgtctgttgcctggttttgataatgtcactgtggagagcagctgggtgatgagtaaataggacttactgtactatttttacatttctgtgatctaaaaattacttcaaaataaaaagttacaatagggcatctattagtttgtaagtgaaataataaagaaaaacaaagtaaagtgagtcataaaatagatgcccacaacatattgttgaaatttaaagatgcagatggcagagcagaatgcctacacaaaacatacccagcaaaatggtgcacaaatatgctcagagaagtgtatggttggaggttgccaaatctaatagtggtgatcagtagacggaagtgtccactttttgggggtaacttttttttttttcttgagacaaggtatggctctgtcacctaggctggagtgcagtggcaaaatcacgcctcactgtaacctctgcttcctgggctcaagcgatcctcctgcctcagcctcctgagtagctgggaatacaggagcccaccaccatgcccagctaatttttgtatttttagtagagacagagtttcaccatgttggtcaggctggtctcgaactcctgacctcaagtgatccgcctgccttggtctcccaaagtactgggattacaggagtgagccactgggcctaaccatgcatttaaaaaaattttttttaaatttgttttgagatagggtctcactccactgcctaggctgaagtgcagcagtggtacttaaatttttttttttcttttttttttttttttgacacagagtcttgctctgtcacccaggctggagtgcaatggcaccatctcggctcactgcaacctccacctccaggattctaagcgattctcttgcctcagcctcccaagtagctgggattacaggcatgtgccaccacgcccagctaatttttgtatttttagtagagacggggttttgtcatgttggccaggctggtcttgaactcctgacctcaggtgatccacctgcctcagcctcccaaagtgctgggattataggcgtgagccaccgcacctggcccttaattttctttcttttttttttttttgagatggaatctcactccatcgcccaggctggagtgcagtggcgcgatctcagctcactgcaacctccgcctcctgggttcgagtgattctcctgcctcagcctccagagtagctgggattacaggtgactgccaccacgcccagctaatttttgtatttttagtagagtcggggtttcaccgtgttggccaggctggtctcgaattcctgaccttgtgatctgcctacctcggtctcccaaagtgctagaattacaagtgtgagccactgcgcccagtaatttcttttttaaagaaattatgactatacaaatgcatagtcagctttttaaaaaaattaattacatgtataaatacgtgtgtatgtgtatagttaaacctccgaatagcacaaagtgtgtccaataacaaatactgttaaacacatcagctagtttctttttaataaagggaaatgtcatcattaataaactggaaatctctttggcagctcttccaaattctactttccatcttccctcttcagagacaaccattatcaagacggtatgtgtacctttcaatctgttccttatattttatcatgcatataagaattcaggcagggcgaggtggctcatgcctgaaatcccaccactttgggaggctgaggcgggtggatcacaaggtcaggagatcgagaccatcctggctaacacagtgaaaccccgtctctactcaaaatacaaaaacaaaattagccgggtatggtggcgggtgcctgtagtcccagctacttgggaggctgaggcaagagaatggcgtgagcccaggaggtggaggttgcagtgagccgagatcacaccactgcactccagcctgggtgacagagagagactctgtctcaataacaacaacaaaaaaagaattcaaattaattcatacttttttttaattgtatgattggtattttacatatcgttcttcaacttgctttccaaatttgccattatatttttgggatctattcatgttgattcatacatctcctgttcagagctgtttttctataaagggccagagtaaatattttgggctttgtgagccatagggtccctgttcactctgccacaccctaatgctatagctgagaggtagtcatagcagtacgtaaatgaatgatgtggctgtgttccagtaaaattgaacactaaaatttgattttcatagaattttacatattatgaatattcttctttcgtccttttaaaattattcaaaaatgtaaacatcattcttagcccatgagctgtacaaaatcaggcaatgggtcacttttggctcactgtttgctgacccctgctctagtgcattaatctgaacagctgtagagggttccactatgtctatacccatttcatgtgtccattcccctacagagagatatttaggttgtttccttttttattgctgttgcgaaatggagcccttaagcaagtcttcttatatcatgtgtcctatttaatagaaacaataaatgcatttcatgaatgagtgaaaaggcaatattgcgtcaataccatctgtgaccttttgaaaaatagatgcttgccaaagatgcctatggaagaattggcacaagaattaatgcttttaaaaagctccagatgaattaaattattgcccacagtacttacattttcttcctctctagcaagtgtttaggggctcaatttaatgagatttgggtgcggtaggagtgctggctctgagccggtgccagcagtagatggcggttgatcatagtgctaagtgctttaaatccaagtctcaccacagccctgtagaatcagggctgttttttagccccatttttcagatgagcaagatcgacgggcaggagtagaagtctcagtggctaagtatggcaggaaagagaaacgggatacagaagtttacaacgcctggtagagcaagaggctctcatgaaattatacggactgtggtcggttgaataatggtccccaaagatatccgtgccctagtcgctgaaacctgtgaatattttacacagtcaaagggactttgcagatacgattaaagcttttttttttttttttttgagatggactctctctctgtcgcctaggctggagtgcagtggcctgatctcggctcactgaaacctcagccgcctgagttgaagcgattctcctgcctcagcctctcgagtagctgggattacaagtgtgcgccaccacgcctggctaatttttgtatttttagtagagacggggttttaccatattggcgaggctggtctggaactcctgacctcaaatgatccacccacttcggtctcccaaagtgctgggattatagttgtgagccaccacacccagccaaattaaggctcttaaaatggaaagatcatcctggattatacgggtggacccaaggtaatcaaaagtacttacttataagagggaggcggcaggtaagtcaaaggaggagagaggggatgcaccagcagaaggagcggtcgggtgatgtgagaagggtttcaggagcaagggatgcagccggaaagccaggagagggaaaggaagtagactttccattccagactccccaaggaaccagccctgccaacaccttgacatgcatcccgtgagactaatttaggacttctgccctccagaactgtaagaataaatttgtgggccgggcgcggtggctcacgcctgtagtctccgcactttgggaggccgaggtgggcggatcatgaggtcaggagatcgagaccatcctcgctaacacggtgaaaccccgtctctactaaaaacacacacaaaaaaagttagcctggcgtggtgttgggcgcctgtagtcccagctacttgggaggccgaggcaggagaatagcgtgaacccgggaggtggcggagcttgcagtgagcggagatcgcgcctgcactccagcctccgtctcaaaataaataaacaaataaatttgttttgttagcgcctcagatttttttttttaatttttttgagagggagtcttgctctgtcgcccaggctggagtgcagtggcatgatctcggctcactgcaagctccgccacctcccaggttcacgccattctcctgcctcagcctcctgagtagctgggactacaggcgtccgccaccacgcccggctaatttttttttgtatttttaatagagacagggtttcaccgtgtttgccaggatggtctcgatctgttgacctcgtgatctgcccgcctcggcctcccaaagtgctgggattacaggcatgagccaccgcgcccggccagcccctcagttttaagttcgtggtaatgttacagcagcaagagggaattaacgcagggcctgtgagtgagttagggagaaaagtgaaaggggactttaataaacagtgctactgggctggggttggtggctcatacctgtaattccagcactttgggaggtcgaggcaggaggcttgcttgggcccagcagttcaagaccagcctgggtaacatagtgggcgggacccctgtcgctgcaaaaacttatttaaaaattagctgggtgtggtggcacgtacatatagtcccagttacttgggaggctgaggtgggaggattgtttgatcgcaggagttcaaggctgcagtgagctatgattgtaccactgcactccagcctgggtgacagtgcaagatctcatccataaaaataaaacaataaaaatagtgctaatcactttaaatggactcctcttaattttttttagatagaggaaaaaatcagaattccttctgttgcttgattgtgcttccttaaataagtctccttgcattgcctgggctgcatagagccactgttttgttttcagattttgcaattgttcgtggactgtgactgtgagaacagagttgctgaatccactcacagaatgggaaactatgacacaggcagatccatgcttccctaaggaaccagagtctgaagctgtgttcattcacatcatgagatctcaccctcggccgggcacggtggctcatgcctataatatcagcactttgggagcccgaggcagatggatcacctgaggtcaggagtttgagaccagcttggccaacttggggagaccttgtctctactgaaaatacaaagattagctgggtgtggtggcatgtgcctgtggtcccagctactcaggaggctgatgcaggaggatcgcttaaacctgggaggcagaggttgcagtgagttgagatctcgtcactgtactccagcctgggcaacagcctgggcaaaagaaaaaaaaaaaaaggaaaaacagaaatctcaccttcactgttatgttaatgaatacagagtccaacttatagtctgtagtgagacaagaacaaaaattgggaaattgtgtaggtagaatatggcaaaagtacaatataaatggaacataaatataaatatgtatagttacttctttttaaaaaaaattttacacaaataactcttctagacaaattttaaaatacagattttaaaaaagaaaaataaatgttcttgttacaatatagaacagataactactgttggcctaaatacacaagtattttcacaaaaaatgatcatactgcataaaccatcttgtgactacttggtgttctaaatcaccatgtacatctttccatgccaataagcacgttttctttcttttttgttgtttgagatggagtctcactatgtcgcccaggctggagtgcagtggcacgatctcagctcactgcaaccaacctccgcctccatgttcaagccattctcctgcctcagcctcccaagtagctgggattccaggcatatgccaccacgcccagaaaatatcttttaaattttttttttattttttagtagagacggggtttcactatgttagccaggatggtcttgatctcctgacctcgtgatctgcccacctcagcctcccaaagtgctgggattacaggcatgagccactgcacctggctaagcaagttttcttttttttttttttttttttgagacggagtctcgctctgtcgcccaggctggagtgcaatgcagtcatcttggctcactgcaagctccgcctccctggttcacgtcattctcctgcctcagcctcccgagtagctgggattacaggcacccaccactacgcccagctaattttttgtatttttagtaaagatggggtttcaccgtgttagccaggatggtcttgatctcctgacctcgtgatccgcccgcctgggcctcccaaagtgctagcattacaggcatgagccaccgcgcccagcagcaagttttcttaaaagtatttcccggagcggtttccaaagaatgttaacaggtattacaataagttctaggatgagattatcttgaagatcctagggtagaggcagttggggaacattgttgcaagatactttgataatgagagacaaacagatggatctaagatgggaggaataatagaagggtccaagtgatctggccatggaaaccctctctcgttttctttttatcttattttattttattttttatttttgagacagggtcttgctctgttgcccaagctggagtgcagtggcacgatcacagctcactgcagcctcagcctcctggactcaagcaatcctcccacttcagccctcctggtagctgggactacaggggtgcaccaccttgcctgactaatttttttttttttttttttgagatggggttttgctcgtcacccaggctggagtgcaatagcgcgatcttgtctcactgcaacctctgactcctgggttcaagggattctcctgcctcacctcctgagtagctgggattacaggcgcccgccaccatgcctgactcatttttgtagttttagtagaaatggggtttcaccacgttggtcaggctggtctccaactcctgacctcaggtgatccacctgcctcagcctcccaaagttctgggattacaggtgtgagccactgtatctggccttcatttttaattgaggagaaatttaccaaacataaaattaactattttaaagtgaacaattcagtggtatttagtactttcacaatggtatgcaaccaacacctctgtttagttccaaaatattttcatcactccacaataacccttatcctgggatcatgaatgcctcactcttcctggtgtttgttgaatgaatacatagaagcatggtttaaggctatagcaacaatttcttcaactgtaatctgtaggactacgtatccagaagaacaggaaaggccaagatgtaaatccacactccgcgataacccgacggtcctctctcaaaccccagaaaaggaaaaaaaatcctctacaatttgttactaccatagcccaaacaaacaatatatttattcaatgtatttaagcttaagaagaggctatttttccccaaagcattttggcaggttataaagatttgaacatttaactcactaatcatctccatctcttaaatggctagaaaggttatcttatcttgtatctttctgtttggaaccttaagaaaaaaaagtgaactctttcggctgggcatagtggctcatgcctgtaatcccagcactttgcgaggccgaggcaggtggatcatttgaggtcaggggttcgagaccagcctggccaacatggcaaaaccccgtctctactaaaaacacaaaaatcagtcaggcgtggtgacgggcacctgtaatcccagctactggggaggctgaggtaggagaatcgtttgaacctgggaagcagaggttgcagtgagccaaaattgtgtcactgcactccagcctagatgacaagagcgaaactccatctcaaaaaaaaaccaaaaaccaaacaaacaaaaaaccctctttcttccctagcaggaagtcaaaagattaaattctataattgatgctcaacagccaggagtgtaaatgtactatttagatttcgggagtaaaagcggaaaaaaatacaaccagcaagagttaaaagtcgtttcctgagaagagtaggcctgggggtgggacagggcagtcttagttttcattattaccccttctgcagttgattaatttttaaccaccagcaagggattctttcatttaaaattgttcttaaaagaaatacaggctgggcgcggtggtttacacctgtaatcccagcactttgggaggccagggtgggcggatcacgaggtcaggagttcaagaccagcctggccagccagcatggtgaaaccctgtctctactaaaaaaatacaaaaacttagtcgggcgtggtggcatgcgcctgtaatcccagctactcgggaggctgaggcaggagaattggttgaacccgggagacttggttgaacccgggagacttgggaggctgaggcaggagaattgcttgaacccgggagacggaggaggttgcagtgggctgagatcatgccactgcactccatcctggcgacagaacgagactctgtctcaaacaaaaaaaaaaaaaaaaaaaaaaaaaaaaacccaaccaaacagaaaaaaaccttaaggcaaagtactacaaaatgaaaataaaataatacgtacttggggacctttaaaaaaaaaaatcctggtggttgggccacaccctggaccgataaagtctgaatctctggggatgggatgcagccgttagcataattttttaaagttctccagatgactctaaagtcatctggttgaaaaccagcactttagagaccctggaagttttcttttagtgttaactttctgtaatctatagagtaatttcctgtctctgcaaaaatagctccaaggcatttggggtggtttctaacctattttctaaataattaatctttaaagtaatgatttaaaaaatacaatattacattagaatgcaggaaatatcatttgtcataaggagaccaacagctttctctgtgcatccatgtgagggtatcacatatttggggtgtaggtgaccactggtagcctgtattttttttaagacagagtctcattctgttgccaaggctggggtgtggtggtgcgatctcagctcactgcaacatcgacctctcgggctcaagagatcctcccacctcagtaccccctccatgaggagtagctttttatttgtattttttgtagagacagggtttcatcatgttgctcaggatgggtagcctgtatttttataattttatttaacctattgagtttaattaaattccctttcaccctactccacactcggtgacttcaaagagagggtatggtcagttcagctctacagaggagaagagaacattctgaatgtttcaatatcttggggaagctggaatgttaggatattttagctgcaaataacacaaacccaactcagcagggcttgaacaataaggtcattgattaaccgtctctcaaggagtttggcgttaggatgtctccagggtggtgatttagtagttaatttgggagccaagatttttattttttttaatttttttgagacagagtctggttctgtctcccaggctagagtgcagtggcacgatctcggctcactgcaacctccgcctcttgggttcaagcgattctcgtgcctcggcctccctagtagctggaattacaggtgcctaccaccacgccaggctaatttttgtatttttagtggagatagggtttcaccatgttggccaggctggtcttgaactcctgacctcaagtgattggcccgccttggcctcccaaagtgctgggattgcaggtgtgagccaccgcgccccacggaggagccaggatttttccttcctttcattctcctatgctcagcttgttttctctggctgcctctcatcatggccccaagatggctgcagagttgtagaagtcacagggagatggcaatgtccagaggcaaaaagaaaagtcccagccttctgtccctttttaagggtgaagaaaaccttccctgaaggcctctcaaccactctccctcatatcttgttggtcaaagttgcatcacatacctattcctaactcacaacttggcaagaaattgagattgccctggtgggctcacatccaagggaacatgggtgtgtgtgtgtgtgtgtgtgtgtgtgtgtgtacatgcttacatatctaacattaatataaaagacattttattccagtgtattctgatttggttagtagttagtagtttcctttggcaatcttacactagtgagctgaacatcaaagtgtacacatacatatacttctgtgtggccatattaatttataagataacaattttaaaattatatatagtgaagccaattatatttgggcatttagcatgtgataaaaattgccttttaaaatgagtagggggtggccgggcacggtggctgacgcctgtaattccagcactttgggaggccgaggcgggtggatcacttgaggtcaggagttcaagaccagccagaccaatatagtgaaaccctgtctctactaaaaatacaaaaattagccgggtgtgccagcaggcacctgtaatcccagctactcaggaggctgaggcagcagaatcgcttgaacctgggaggcagagtttgcagtgagctgagatcacgccattgcactccagcctgggcgaaaaagctagactctgtctctaaaacaaacaaacaaaagtgagtaagggggaaagatgaattataccataaatggtattgggataacttagtggctgtctagaaaaactataaacttagagctacatttcaaagcatacccaaggatgaatttcaaaaggataaaaaatttcattgcaaacaaacaaattataaaagcactagaagaagctatcagaatgttaaaataatcttgaagagggggagatcgtttttactaagacacataaatcagaagctataaaattaaaacacttgcatggcaaaaactataataagtaaagtgaaaagacaagacacttggaaaaaaataattgcagcttatattactaagtattaatttccctatatataaagagtttctaaaaatcaatcagaaaaaggccaagagtctgccagaaaaactgaaacaaggatatatatgatagttcacagaaaagggaataccagtggcttttaaacatgtgggaagtgattaaccttccttataataagaggtatgcaaaatagattatagggagatactggttttgttcacctactaaatgacaaatgatcaaaaactttgataacatactatgtgggcaaggatgtggtaacacagtcattttcatatctatcaaaattacaaacacatatatgtcctttaaaccagtaactgtatttccaagaatttattgtgcagacatacttatacatgtacaaatatctaatgtcttatatgaaaagtgttcatcaatgcagcattatttatagtaccaaaagataaaacaactgtctgggtgcggtggcgcatgcctgtaatcccagcactttgggaggcctaggtgactggatcaatcacctgaggtcaggagttcaagaccagcctggccaacatggtaaaacaccgtttctactaaaaatacaaaaattagccaggcatggtggcgggtgcctgtaatcccagctactcgggagactgaggcaagagaatcgcttgaacccaggaggcagaggttgcagtgaaccaagatcacaccactgcactccagcctgggcgatagaatgaatctccttggaaaaaaaaaaaaaatcaaagctacaaaaataagcttactttatgctgtgtttttaaccaaatgcaagtcataatgacagcctctgcattagttctgaggatgtccttaagaatgaataaatattattttttcttttgttttgggagttgtttaattttcccgagaaaaattgtagctcagcatgttaagatagtcttgactttatattcaacttcgtgctggatcataaagtcagtttttttttgttgttgttttgtttttgagatggagtcttgctctgtcgctgaggctggagtggattggcgcgatctcggctcactgcaacctctgcctcccgagttcaagccattctcctacctcagcctcctgagtagcctggctaatttctgtatttttagtagagatggggtttcaccatgttggccaggctggcctggaactcctgacctcaggtgatccgcccgccttggcctcccaaactgctgggattacaggcgtgagtcaccgtgcccggccgcatatgttttattttgaggggacagaagcaactaaaatttcaacaaaaccaattctttgtgttgctccctcacttctttctattgatctaataaacatcacatagcacagtgatggttgaagaccagtggaaaagagagaaagtgaaaacttaacaggacttcttattgtacgatttttatgtttgcaaagatgtgatatgaaatttcatttattgctgtcaaatattgacatctatctgtggacacaaaataatctttttttttcctcccccactgtctatttccctacccaaccttgcattaagaaagcaattgacaaactaatgtatggaaagcgaatcttttgtgctgtctataatgaccacattttcctttgggctcaccaaagccgttcaaacaagagctccgttgtccctttcagaagagaataatagaaaacttaaatgaaacctggaggtcatttgacctcttaggaaacgtggaggtagacaccacagctcaaaaccccggagcctgttaacatgtgacacattgtacacactcatatttttagaggaaaagatgaggatttctgctgccctgggaggttgtggaataatgctttcctcatttcaggattctgagcctgtttccacatcagagaacccatcagatatattttatccaaaacaaagataaaacttgagtaaaaataatgatgataattataacagtaagcataccagcagccaccatttattgaatgcttaatatttcatccccactatgaccctatgaggtggacatgatgattgtgtccattctacagatgaacaaactgaggttcagaaaggaaaagcagctaatccaggaagtcttaaagctggtgtttagatgtagactattttggaagcttctttcctaaacattgtgttattctgtttcttgtttctcttttttttttttttttttttttgagacggagtctcgccctgtcacccaagctggagtgcagtggtgtgatctcagctcactgcaaactccgcctcccgggtttaagcgattctcttgcctcagcctcccaagtggctgggattacaggcacccaccaccccacctgcctaatttttgtatttttagtgagacggggtttcaccatattggccaggctggtcacaaactcctgacctcaggtgatctgcctgcctcagcctcccaaagtgctgggattacaggcgtgagccacaatgcctggtctctgtttcttatctcttataaactcttctgttgccttaaaaaattaaaaaattcagcatgtagacaggtatggtggctcaagcctgtaatatcagcattttgggaggccaaagcaggaggatcacttgaggccggaagtgtgagacaagcctgggaaacatagtgagaccctgtctctacaaaaaattagccaggcgtggtggtgtatgcacccgtagtcccagctacttgggaggctgaggtgggaaaaatgcttgagcccatgagtttgaagtcatagtgagctatgattgcaccagtacactcaagcccagccagaataaccatgtatttaattatataataaatgttacttaaaattgtatactggtacataattttcacaatttaaccaaggaggtgcaagatctgtgcactataaaactataaaacattgatgaaagaaattaaagaagatacaaataaatggaatgatagcccacgttcatggatgggaagaattaatattttatttctagaaattgatccagcagagattctccaccagtgagaacatcaaacatctcacaccagggagaatatctgctggatcaattcctagaaataaaacagctgcatcaaagtaaaatatgcatggtaaattttggcaaatatcgccaagttgcttgctcatcaatagtagactggccaaagaaatgatggtacctccttactgaagaacattatgcagccatcataagaatgaggaggtattaaaagtaattgcagaaaccacaattacttttgcaccaacctaatgttagctgatatgaatgcccccgtcctatgcaggtgaattaaaaagcaaggcacaaactggtgttatggtatttatcattgttaaggttttataaatgtgcattattgcgcaaggagtggttctggaaggataaacgagaaaatgattaacccattggcttcagggacggaaactgaatggctgctgggtaatggggacagaagatagtctactctttggcacttcttgaattttgtagcatgtgaatgtataacttgttcaactgaaaaattcaccctatagatttacaaaatatcagaactatcatcttgccaccagcccagttatatggatgagaaaactgaggcccagtagagtcagctgatgcaggcctggcccgatgctctgcacactctgcatcctgcccctagacatccttatgctttctcctttgaggctctcagaagcttgggagcagacagtgtggcactgaatactgggaagaaatgcatcccaaaggccatagaaatcttttctggggagctggctagaaaggctgggacagtttgaatggcaccagtgatcacatggtcaggaacatcacccagaacacaaacagccacagcatcttttttttttttttttttttttttttttttttgagacagagtttcactcttgtcacccaggctggagtgcagtggtgtgatctcggctcactgccacctccgcctcctgggttcaagctattgccctgcctcagcctcctgagtagctgtgattacaggcacatgccaccatgcctggctaatttttgtatttttagtacagacggtgtttcaccatgttagtcaggctagtcttgaacacctgacctcgtgatccacctgccttggcctcccaaagtgctgagattataggcgtgagccactgcacccagccaccacagcacctttgttggatgacactcatgtgccccatttatctcccttaatcctgaattcaaccccttgagtcaaactctatggccacctccataggctctggcaccattggctcacacctcgaaagccaacagccacggtctaccactatgctcagccatctttctctctttaaaagtcattgattggggctggccagtggctcacacacgcctgtaatccagcactttggtaggccgaggcggatggatcacttgaggtcaggagttagagaccagctgaccaacatggtgaaaccccatctctaccaaaaatacaaaattagccgggcgtggtgggaggctacttgggagactgaggcaggagactcacttgaacctgggaggtggagcttgcagtgagctgagattgtgccattgcactccagcctgggcaataagagcgaaactctgtctcaaaaaaaaaaaagtcattgattgatctctttctggtttaactgctattatttagttttatagcattacattcaagtttttatagcattacaattcctagattctattttcaaatattgatttgcttaattttttttttttttttgagatggggttttgctctgtcgcccaggctggagtgcaatggcatgatcttggctcactgcaacctctgcctcctgggttcagccattctcctgcctcagcctcccgagtggctgggactacaggtgcccgccaccacgcctggctaattttttttttttatatttttagtagagacggggtttcaccatgttagccaggatggtctcgatctcctgacctcgtgatccgcccgcctcggcctcccaaagtgctaggattacaggcttgagccaccgcgcctggcctttaatataatttttatgaagacattatttccacttcattgggctctctagaattagattgcataaatactgtagttttatttcaataaaaagtcaactgttatttaaaccatgactaaagcttgacatgaatagagactttaaaacaataaacattgccagacatggtggcacatgcctgtagtctcagctactcaagaaactgagacaggaggatctcctgagccaaggagttccagcccagcctggacaacatagtgagatcccatctcttaaaaaaaaaaaaaaaaagatttgcttaattttacttttacaattttttcttttctttttttttttttttttttttttttttttgagatggagtcttgctctgttaccaggctggagtgcagtggtgtgatatcggctccctgcaacctctgcctcctgggttaaagcaattttcctgccccagcctcccgagtagctgggactacaggcgcgcgtcaccacacccagctaatttttgtatttttagtagagatggggtttcaccatgttggccaggatggtctcaatctcttgatctcgtgatccgcccaccttggcctcccaaagtgctggaattacaggcgtgatccgccataacctggccttccttcttttctttaaaaatttttttctgagacagagtctcactctgttgcccagcctggagtgcagtggcacaatctcggctcactgtagcctccaccttctgggttcaagtgattctcgtgcctcagcctcccgagtagctgtgactacaggtgtgtgccctcatgcctggctaatttttgtatttttagtagagatggggtttcaccatgttggccaggctggtctcgaaccctgggctcaagtgttctgtctgcctcagccccccaaagtgctgggattacaggcatgagccaaagtgcctggctagaaaattgtaaaagtaacttaatatctgcctcatatacttttgttttatttaaaaatgcaaatcctcaaccacaaatcgaaacaagaacaaccctctgatgacttccctccctctctctttgtacaaagaagactttctgctgtctgactctgaccaccttggtctattttatggagctccaaccctgccttgtttccttctcaggccatctgtcctggttggcctcactgttggaaatgctcttctcaagatgttcacgtggctggttctttgtcattcagtctcagttcaaatactccctcctccaggaagccttccctaacttcctaggtgaaagtggttcccttcccctgagtcacgattatggtttcttcagtgtacttattaatggccaacactgtctcctttattgtttgcttatgaatttaaagtctgttagcagcacctgcagcttttaaaagcctccttgtctctctctctttttttttttttttttttttttgaggcggagtttcgctcttgttggccaggctggaacgcagtgatgcgatctcggctcagtgcaacctccacctcttgggttcaagtgattctcctgcctcagcctccttagtagctgagactacaggcatgtgccaccatgctggctaatttttgtatttttagtagagacagggtttcgtcatattggccaagctggtctcgaacccctgacctcaggtgatccacccatcttggcctcccagatgctgggattacaggcgtgagccactgcgcctggcctaattgtcattttcgtttttttgttgagacagagtttctgtcacccaggctggaatgcagtggcacgatctcagctcactgcagcctctgcctcttgggttcaattgattctcctgcctcagcctcccaagtagctgggactacaggtgtgtgccaccacacccagctaattttttcatttttagtagagacggggtttcaccatgttggtcaggcttgtctcgaactcctgacctcaggtgatccgtccaacttggcctcccaaagtgctgagattacaggcatgagctaccgtgcccagctctcaattgtcacttttagtgcatattttctggttgtataaaagctctcccatgcaagagggctgatgttataacagtcgattattatactgtcctgcattttcatcaggtaaagaaagcttttcatgtttcactgagaatagtcaaccccttcacaatgtagaacccgaagattggatcttctgagaacatcagagaaagactgtccttgccatccacactgcaagaaaacttcaggatcttgaaccttgcgttcataatctcgcaaatgaaaagggtccctccacactcttggaactgtacacccattggaacctttaaggtaaagctaaccaaggaagtctccccagaagaagatggcatccttgatgtgaacagcttttcctaagatcgtggatcaagacttctaccatcatgagactttcatgaatattttttccttgttaatgtctctatggttttttttttttgttttttttttgtttttaggcggagtctcgctctgttgcccaggctagagtgcaatggcgcaatcttggctcactgcaatctccacctccctggttcaagtgattctcctgcctcagcctccctagtagctgagactacaggcacatgccaccatgcccagctaatttttttgtatttttagtagagacggggtttcactatgttggccaggctggtctcgaactcctgacctcaggatatccatctgcctcagcctcccaaagtgctgggattacaggcatgagccatctcaccaggcctagttttagacttttgaaccatgtggatatacacccatgaaaagttaaataataaggatgtaagataattgtatactaccttataaatattcttttaaaaaataaactggttaaatttttataagaagcctatctttccaatctttgagacagctgacaataatgatttttttaatgggaaaatatgtacatgccactgtaaatcagttaactagggggttggggatgaagagaggatggttaatggatgcaagcacataatcagatagaaggagtaagttctagtgttctatagcacagtagggtgactgtagttaacaagaatgtattgtgtatttcaaaacagccacaagaaaagatttgaaatatttccaacacacacacatacaaataagttaactagtatgaaaatattgaaatacctaacgcctctttttttttttttttgagatggactgttgctctgtcacccagggtggagtgtagtggcgcgatctcagctcactgcaacctccacctcctgggttcaagcaattctcctgcctcagcctcccgagtagctgggattacaggcgcacggcaccatgcccggctaatttttgtgttttcagtataaacgggttttccaccacattggccaggctggtcttgaactcctgacctcgtgacccgcccacctcggcctcccaaagtgctgggattacaggtgtgagccaccatgtctgaccatgcctcttcttttccttagtccttccatacctcggagataactcttattaataggagcccctcatcttccatccactcctcaccactttaaccatcttcatggttagattacataacacatgtagatttacaattaaccttattttttaattttttattttttgagatggggctttcgctacattgcccaggctgatcttaaaatcctgggctcaggcaatcctcttgcctcagcctcctgagtacctgggaagaggcatgcaccacttgagcccaggcaatttgtcttttcaattggcaatgcaaccgatgcatttcctgtcagaatatctgctccttcattttattttagtggtattttatcctttgcacgtaccataaatttttttttttttttttgagacacagtctcgctctgttgcccaggctggagtgcaatggtgcgatctctgctcactgcaacctccgcctccccagttcaaacaattctcctgcctcagcctcctgagtagctgagattacaggcatatgccaccatgcccagctaatttttgtatttttagtagagacaaggtttcaccatgttggtcaggctagtctcgaactcttgacctcatgatcaacccacctcggcctatcaaactgctgggattacaggcatgagccaccgcgcctggccacataccataaatttttaaggaaacctctcatggtgactatttaggcatttctattttttctactatcataaataatgtcatagtatagatccctttgtatatgctgataggatttaaaccactatcatttttttctttttgagatggtgtctcactctgttgcccaggctatagtgcagtggcaccatctcccctcactgcaacctccacctcccaggttcaagcaattctcctgcctcagcctcctgagtagctgggattataggcatgtgccaacatgcccagctaatttttgtgtttttagtagagacggggtttcaccatgttggccaggatggtcttgatctcttgacctcaggtgatccgcctgcctcagcctcccaatgtgctgggattacaggcatgagccgccgtgcccggcctcattttaaaaattttatttatttttcgagacagagtctcgctctgtcgcccaggctggaatgcagtggtgtgatcttgactcactgtaacctccacctcctgggtttaagcaattctcatgcctcagcttgctgagtagacctgggattgtaggcgcatgccaccgtgcctgactaatttttgtatttttaatagagacggggtttcaccatgttggccaggctggtctcgaactcctgacctcaggtgatcctcccacctaggcctcccaaagtgctgggattataggtatgagccactgtgcccggcctaccactatcatttttatagtaaaattaatttagtaggcctatgccctgggcaaaatttcttcacttcgttgttgcttatttaccaaacgggtaaatttttcttattttttatttttatttattaatttattttttcttttgttgctaatcatgtttttaaaaaaactccaatgctagtttcacagacttaagattcagataactacttttaaaagaatccttgtaaatattacttcagtcgaagtcattttttagtcagtaataaaactcagtttaggaacccaagaacaaaggcagagcctcagaatgaatttacatgtgaccgttttctgaaatcttacgtctaaggaaaaagttagagactgacatttctaaatctaatttattttaggcttaagaatatagatgcataagttttcccagagacttaaagaaatctttattgataacagagagaatgaaacaaaagtaataaatcaccagagaggaccagctcacaaaaatacctgaatgaaggcacgtattgcatcattgttggcaatcgtgaaaaatttgaaaaaccttaaatggccactaaaagagaagtggttgtatatatcatgatatatccatccatggactactatgtataaataaaaaagaatgaggcggacttatatgtatcagtttggaaagactggcaagtctaatagctgagtgagataaaagaagtacatgattgtcattatggtatgacagcattaattaaaaaaaaaccacggcaatatatgtgtatagatatgcatttttgcatgtatgtgtgtagatatgtgcatttatggatgtaaattcctgcaagagacacagaagacacacacacatcctagcaagaggggagtggcctaatgttagaaacagagaaacagtgcaagagacatttagatttactttgcaaactctcagtgtcgactcttttacagatatgcacggctggtgttattaagtatattttcaagcacaaaggaaccagaggtcgatggtgaaatcagatgctttcaatggaaacatatttcattcttctaaaaataactttggtgattcggaatccatccttaatcgtagcagccagcccatttttgtggctctttcatttcccccagaaaaaaaaaaagtgtataaacacagcaggatataaatgcatgcatctggagaagatgaacttttacactagttctgccttttcagctttctaaaatgtggaccttaccaatttctttgacctccccctcctttttttccattccaatgcatggcggtgacaaggcattgaattaccagtttgtcactaacgccataggctttattattcctttgaacagaagctgggcttaaaaagaaaagtttttcttaataagtagctgttcatcctttgatatgcacatctggatctgtggtcttatctgcggcatgctaatgctgcttcctgcagataatgataaaggaacaactcaaaataacaaaaaaggaataaaatgtgccagatgcctaaaaaataaggaggacaatgcaaataaaagcaactggtttttctattctggagaataaactctacccacaattgaagtaatcattttggtggttacttgatacacacttttttttttaagagattaggaaggaaaaaaaaaaagcaaacatcagctgacaagcactgccacattctgttagaaattaagagggaaataaacctaagtacgctataaatcactttggggtttaattttgcttctaccctgctacatcgtttcttctgtttcttcttttttcttcatttggctgtggcttaaacattgttaattaaaagccaaactgaaagattttgactcatacattttttaggaatataaaatatttcaaatatacagaaaagtaccaggaataccgtaaggaacattcgtgtatctaccatcagggtttaacaatttttctatttttccttcctgttcatttttaaagaatacatttccttcattctgagttttttcaaatgtgatttttcttgatttctgtatcacctttgttcactaaaagaaggtgttcttcttataaaaatatgattttctcagttttagtcaagtttctcaaaggagctttctttccctgctctgtgtaaatgggtcttgttttgaaagttagattagcgttaagacgtaagagtgaaattgttatataatacatatatgatttctagatattatgtatgatttctgtctaggtgatctttgttctttatgacttcttttcacaagaggcaacgataaacctgctttgtcaatacgtgcatagaccttcagtagttctgaggctgattgtaactggtattttaataggcaaataaaaacttctgctttacataaattgctctataaactgggagctgaggattgtgaggagggcgaaaaggccatggtgccctctctaccgctgcacaaacccagattgtgtgtggttgggatcccttggtagcccaaccagataagagtcatgaattgattccacattagcatgcagcaggcatgggaaaatgataaactcctattaccactgtcatggcaactgaaaaaatggctgctttggggggaacaaggtccacaggagaagaaaagcgaagccccgtctctttcttctgtttgacatctgttgtttaacatacaaaattgtattatcgtgacgcaagcgagtcagccagggctaaagcctggctaggaattgtcaaaaccatactgccccaactcccattcccctctctctaccatgagagtatataatttgaccccggacatttccacgaagggcagtaaattcccctcccttttcatcccaggtacaaaaagcgtgaagtgccttgggaaggtggaatagagggaggagggtctttttggggggtagtggagaagggagacatgctatcaattatgaagcaaaaataaagctcttctccgtttgcagttgcttctctaaatgattcattcctccctcctcccttcccccaaccttccctcaagaacattttagatttttcttttatttatttatttatttatttttgagacagagtctcactctgtcacccaggctggagtgcaatggcccagtctcggctcagtgcaacctccgcctcccaggttcaagcgattctcctgcctcagcctccctagtatctgggattacaggcacatgactggctgatttttgtatttttagtagagatggggtttcaccatgttggccaggctggtctcaaactcctgaccttgtgatccgcccacctcagcctcccaaagtgctgggattacaggcgtgagtcatcgcagccagccctagatttttctaaaacagcaatttgagcggggcttgtgaacacagacaaaacatgagcagataggctacaagcagggatggcagccttaggcgcagggctgaaggttgaaaatcctgattgcaggtcattgagaaaaggctagaaggaaacacacctgagtgctaaccaggagttggacaagaggtggatttttatttccttcttaatatagcccttttcaaaatgtttaataaagtacctgtgtcagtcactctcatactcagcagaaatatccaataagctttcggaggtccaggaatgggtctcaaaggagctttcaaagggtctcaaagatctcaaagtttctctcaaaggaggattgaggtgtagatgctcacacaaaaattctgttcggcaaatttccatatgatccaaacatatcacttgaagcaaatcctttgcatataaatataaatatatacaaatttatttgtatattatatataatatttatatatcatgcattatatttatacattatatattatattatattatatttatatatttatattatatattatatattatatttatatatttataatatataatatataatatataatatattatattatatttatatattttatattatatattatatattatatattatatttatatattatatttatatattatatattatatttatatattatatatatttatatagtatatacatattatagatttatattatatataaatttatatatttcatgaaatttatataaatatataaatataaataaatatatatatttcatgaggacatttaaatgagtgactttcaaacacgcttcacttcccacctccccacagttgtgtaaccagaacaaacctagtaccattttgggttgttttcacaacacagcctttaaacagctgtgaaagattggggccatcctaaaatggactaaattgtaatttccagtaagagtgagattaagccccttgataggacaagatcagataagtgcaaacaaaagcaagaacatttatataatcaatctcggccattagcaaagttagcattttaaggtggtaaaacaaaaaaggaacctcttggccaaacccgcaccccatgtgcagtttggaacttcccagtttaaagactatcatctttaaataggatcctatcgaatgggcaggctttgaggggatgcagaagcaaaaccagtggaaaaggtcagaactgctctgtttgtttttccaaattgtcggagtaaagttacaatatgccacctgggtaagcctactagctaaatatccagataatgtacacagtaaccacagggatttctcggacagattggaaacgttggaggaggaatttgcttgggggaagggaactagacgaacctgggttaagccctccctaagcatggaggggttgctcagtgcctgacatgaaaaacggtcttatttttaatcctcaggacatctctttgaggaaggtattattattcccagaataataataggggatgggggatggctcgtgtgacttgcccctggcattttccttcatggatattcccgtatctgatcatttctgcttgtgtttgagctttcagtttcatcagcataatctttgtcggaaggcgggagttttacatttgcaattctagatttttctttctgctggcgttccggcagaccactactgtttgttatatatctacttcacatcaaataagtcaagccgtagaaaaagtcctgggaggtttcctggggtgtgggtgtggggcctctgtgatatttctctttgcagtttaagattttgaaaggcagagggtctgaggggcaaggggagaaagtccccccagagagcggtttcttttttctttcttttttttttggagatggagttttgctcttgttgcccaggctggagtgcagccgcgcgatctcagttcgctgcaacctccacttcctgggttcaagcgattctcctgcctcagcctcccaagtagctgggattacaggcatgtaccaccatgcctggctaatttttgtatttttagtagagatggggtttcaccatgttggccaggctggtcttgaactcttgacctcaggtgatctgcccatctcggcctcccaaagtgctgggattacaatcatgagccgttgcagctggcacaaagagccttttcaattcaaatcctcacccaccttctccctagtcttttcactggatgtctgggggctcacacctgctctctgacactcccataataaagttactaccaaggccaactatggatcagactcacctggtgaattttcagaaaacagatatttgcttccaatttacatacaggctcagatcctgaaggtctagtaattagactcattgcaaaagtgccctccgctgattctcaaaatcagaaataactatgaatgcataggaacacatacaaatttaaagttatgagaatcactaatacatagaaaacaatttcagatttgattactggccaggtccacagctcagcgtaaatgtcacctgtttaaagagatcttcaccatcatcttccaaattctagcccttttaatagcatagagtggatatcatttatctgtgcattcatcatttgcttctccccaacagaatgttagctgcctaagagccagagtcttttccaccctcttctcggtcaagttcaaagtgtctaggttagtgtctacacatcgcaggtattcagtttctgctgggtgggtgcatgagtgaacaaattttttttttttttttttttttgagacagaatcttgctctatcacccaggctggagtgcagtggtgccatctcggctcactgcagcctctgcctcctgggtttgagcaattctagtgcctcagcctccggactagctgggactacaggcacccgccaccacgcccagctaatttttgtatttttagtagatggggtttcaccatgtcggccaggctggtcttgaactactgacctcaagtgatccgcctgcctaggcctcccaaagtgctgggattacaggtgtgagccactgtgtctggcctgaacgaatgatttgattagaaaaggttcagtcagctaagagataccctagcatttatctgatctggcctccttgtttaagaaatcctgggaggcaggacagaaagccaacctggctagctgaggtcaccattcctgggcttctcatcatacctgccacagtggccactgtgaacaactttcttctcctctgacacctgggattttttgtttcaaatactcaaaggtgtgtattacagtattgttaatggtagcaaacacaaaaacaaaaccaacaaaaaacctctagaaacaaaaggaaagaatcctgacacattcacaccatggaatattatatagatattaagtaaaatgagataaaactggaaaaattgtcttaaaggaatttccattaagtattgttgagggaggagagaggctgggtaagaggtaggattattatgatagaaagggaaaagttggtagaattttttttaaaaaagaagaaaattaaataatggtggtattttaaaaatatgtatgatatatccactttatgtatctatgaaaattgcacaattaaacatgcttgtatgtaagcagaagttttcttttttaaaaaatgtgggatggctgggtgtggtggctcacgcatgtaatcccagcactttgggaagctgaggtgggtggataacctgaagtcaggagtttgagaccagcctgaccaacatggtgaaactccatctctactaaaaatacaaaattagctgggcatggtggtgcttgcctgtaatcccagctacttggaaggctgaggcaggagaattgcttgaacccgggaggcagaggttgcagtgagccgagatggagccattgcactgaagcctgggtgacaagagtgaaactccgtctcaaaaacaaaaacaaaaaaagcaagatgcacctacagtgataaaaaggataatgtatagcttcaaatgtaggaaagaaggattaaaaataaataagctgccgggcacagtggctcacgcctgtaatcccagcactttgggaggccgaggcgggcagatcatgaggtcaggagatcgagaccacagtgaaagcccgtcactactaaaaaatacaaaaaattagctgggcgtggtggcgggcacctgtagtccctgctactcaggaggctgaggcaggagaatggcatgaacctggaaggcagagcttgcagtgagccgagatcgcgccactgcactccagcctgggtgacagagcaagactctgtctcaaaaaaaaaaataaaaaataaaataaataagctaacatttacttcaaaatgcagtaagaagaaaaacagggtcaaatataaagaaagatggaaataaaaggaaataaccatctgaaaaaaatttaaacagaaaatgtcctaaagctaatatgaaacgttcggccaggtgcggtggttcatgcctgtaatcccagcactttgggagactgaggctggcacatcactttaggtcaggagtttgagattagcctgactgagatgataaaaccccatctctactaaaactacaaaaattaaccaggtgtggtggcacatgcctgtattcccagctactcgggaggctgaggcaggaggatcgcttgaacctgggagttgttgcagtgagcggagatcgtgccactgcattccagcctgggcgacagagtgagactccgtctcaaaaaaaagctaatatgaaatgttaacagttgtggctgggcgcggtggctcgcgcctgtaatcctagtactttgggaggccgagacgggtggattgcctgagctcaggagtttgagaccagcctgggcaacacagggaagccctgtctctactaaaatacaaaaaattagccgggcatggcggtgtgcgcctgtaattccagccactcaggaggctgaggcaggagaattgctagaagttgggaggcggaggttgcagtgagctgagattgtgccactgcactccagcctgggcaacagagcgagactccatctcaaaaaaaaaagaaatgttaacagttgttattttaaaagaaggttacaaagctgctcattgtatttttttttctactttctgtatttttaaactttcctgttagaaaattatacatcaaaagtaaagtgtccccatgaggtcattctgtccccaggagtgggaggcttgccaggcctctgggtggggtgatgccgtgctcctcccaaccttgatgccaggacttcctaaccaggggacacctcatttcggttctggtcagcctggctttacttctctccttactgcccccttatggtagccatttgccagggttttgtcttccttggttatgtccctagctaagagtgttctggagccttgatgtggatcttgtgtagaggatgaaagctaaaaagtcagggagccacttaaggcatccctggcctggggaaaggagccttccttcttcccatttcccttgtcaatgatgccggctccgtggattctactcccatacttgggtagataatctggaagtctactcctcatcttttatgcaggttttagttctggatagttcttcaatcctgtccacttcccactcccacccccaaacggtgcactatgtatgagccatgcagtaggtaccccgcataaagggaaactcgcacctcccttcctcacagactcccatggcggggaagctggacttggcacaggtggagtcctggggagtaagttcttgggctggcatgttcatcatctcactggtgggctcaccttgggcaaatgacaatttctctaagactcagtttcttcttgcagaaaactaggaccacaaactgggtatacattaagtagataatgagtgtttggacttttgtttactgtgtatctttcccagtttgtctggagggcatagtctttcatggtttcgttcagcatggttttcttagagcgtttatgcatgcctgtcacatgtaggcattctggaaatatttgttgaatgaagtacttttgctttgtagttttactttaaatcttcccttacttctcttggagatttttttttttttttttttttttttttttgtgacggactttcgctcttttttttttttttttttttttgagacggagtctcgctgtcgcccaggctggagtgcagtggcgcaatctcggctcactgcaggctccgccccctggggttcacgccattctcctgcctcagcctcccgagtagctgggactacaggcgcccgccacctcgcccggctatttttttgtatttttagtagagacggggtttcaccgtgttagccaggatggtctcgatctcctgacctcgtgatccacccgcctcggcctcccaaagtgctgggattacaggcgtgagccaccgcgcccggcccggactttcgctcttgttgcccaggctggagtgcaatggcgcgatcgatctcagctcaccaaaacctccacctcccaggttcaagcgattctcctgcctcagcctcctgagtagctgggattacaggcatgcgccaccatgccaggctaattttgtatttttagtagagcctgggtttctccctgttgatcaggctggtctcgaactcctgacctcaggtgatctgcccgcctcggcctctcggcctcccaaagtattgggattacaggtgtgagccaccatgcccagcctaggaggagatatttttaagggtttaaagaacatacctagacatagaattgttgggtcgtgggaaattcacaccttcagcttcaactagatatcaccaattgttctccaaagaggtctgccaatttctactcccaaatagcagtttataagggtttccttctgttcacgttctctctagaacctggtactttcggattttaactgctatgccatcctgatgggaatgaaatgctttttctttaaagggaagaatgaaaatggcaggtccactttaggctatacgacatattgaacaattttaattttactgttactggatatttacattttagttatcccagatctcagctccgatgtctcttctggggaggactttgctgaatccctatataagttggttttcccttcagtcactgactatcccatctgtctatttcccttcccttctgtctatttcccttcccaagcacagaagtcggaaagcatcttttggattgtacttgtttactgctttctctcccaggagactttaagcgcccttgcctgtcttgttcaccactgcacctccaggcctagcacagagcctggtacaggacaagaatgtacaaaatatatagagaataaatgaaagagtgtatggacttattgaaaagcagaagccagtggactaattcaacactggactcactaaaatgaatcttgacagttataggcaagtgctactgtcagatactcttcctttgttttgcccttcttacctttgagccagaggttttgtttttttttttcagttttttgttttgagacggagtctcaaactgcactgcactgtcgcccaggctggagtgcagtggcgcgatcttggctcacaggtgcctgccaccatgcccagctgatttttttgtatttttagtagagatggggtttcatcgtgttagccaggatggtctcaatctcctgaccttgtgatctgcccgccttggcctcccagagtgctgggattacaggcatgagccactgcaccaggcgtgttttgtttttgagacagggcctcactctgtcgctcaagttggagtgcagtggcacgatatcggctcactgcagcctcgacctcctgggcttaagcgatcctcccacctcagcctcctaagtagctgggaccacaggcatgtgctaccacgcccagctgattttttttctttcttttcttttttattttgcagagatggcgtgtcactatgttaaccaggctggtcttgaactcctgagctcgcgtgatcctcctaccttggcctgccaaagtgctgggattacaggtgtgagccaccacacctggcctgagccagaggttttataattcacttaacaagtgtttttgatcaccccccgtgtgccagtgactgtgccatggaactactcatggaatgaaggcaaaattacaggtctgcagttttgctgagagtggccttgggtgactcaactcagaatgagacatgaaatctggcataaataatctcttcaaaagaaaaaaacacttcttggccgggagtggtggctcatgcctttaatcccagcactttgggtggctgaggagggcggatcaaggttgggagttcgagaccagcctgaccaacatggagaaaccccgtctctactgaaaatacaaaattagccagacatggtggtgcacgcctgtaatcccagctactcgggaggctgaggcaggagaatcacttgaaccagggaggtggaggctgcggtgagccaatatcatggcattgcactccagcctgggcaacaagagcgaaactccgtcccgcccccccgcaaaaaaaaaagaaaaagaaaaagaaaaaaaacacttttctcatagaggagtagtagtgatggtgataataaggaaagtcaacatttatcaggggcttactgcatgccaggcatggaactagttgctttgcatgaattatatatttaataattagaaaaacctacagcatggttattcaagtgcagtcaccaatagatgcattgaatctacctgatttctaccagttgtgtggagagaaaacggagacagagaaaaagaagactgatttaaattatctgggccaccatgtgcactcttgcaggtaagagacgaggcacacgtgcattttctggtcttgagctctgtccagtccctgatggtgatactataatagaaaagatatgcaaggtcatttttgaccatactcaaaattttcctctatacactggcttttagaatgaactcctttgaaaacaaaggcttagagggggctaaatgtcttctatagcagagtcacacacctggaggagcagaggcaaccactatggggacccagaggctttgatcctaacctgtctcctaaatttaacacctcactaggttttacttcttcaatacaggttcatgctatgagcactttactgcatcatttattattgtctgttatataaatttcttccaaagagcgcagagctcagtgaacatcaggagaaatgctgaagatcgcagtaaagttcctttcatgggaagccttttaaattataactttagccagactgacttagataggttggatgctctgtttggagacagggacagaaatctgaaagtttatcccaaacccaggattctgtgatcatctcactgtttcccaaactttcgttttttctttcttttttttttttttttcagatggagttttgctctgtcacccaggctggagtgcaatggcataatctttactcagtgcaacctctgcctcctacattcaagcaattctcctgcctcagcctcccaaacagctggaattacaggtgtgcaccaccacgcctggctaatttttgtattcttagtagagacggggtttcaccatgttggccaggctggtctcaaactcctgacctcaagtgatccacccgtctcggccaccccaagtgctgggattacaggcctgagccacctcgcctggcctcccaaacttgcttgatcacggaaaacactcactaaaaaacaaaaacaaaagataaccacacaatgaaacaagaaaacatagtccctggcacatagtaggcgcatgatattttttgaatgatcgaggtaaaattgcgaaattgccaatcgaagaacaaaatgtaaagtctgatttgttgctaacagcttcccaaaactacgtttctgtctttccatgtgcttatacacacgcacatcctcatgctttttaatatgtaagtttgtaaaatcataggtaaaaacttttgtttgtttttgttgtttgagatggactctcgctctgccacccaggctagagtgcagtggtgcgatctcagctcactgtaacctccgcttcccgggctcaagcaattctgctgcctcagcctcctgagtagctagggttacaggcgtgtgccaacatgcccagctaatttttgtatttttagtagagacaaggtttcaccacgttggccaggctagtctcgaactcctgacctcgtgatctggccacctcagcctcctaaagcgctgggattacaggcgtgagccaccgcacctggcccataggtaaaatcttaaaagtgtttgacaaactgtttaaagtgtctttctttggggagagaaaatatttcctcctattgtgcttaaattttaataatttagttacagaaatgcaatagatttaattttaataattgttaataatttgataattataatgatgtgatacatttaatcattttaatagcttgaaaaaataagcgtggcaagtaagagcgatgatctcttttttataactatttaccactgattttctttttcaaaacaaatttgagaaatagtcacgcaatgcctgtctgatacaaggctcagtgctacgtctgctcaggactcagtcctcaagcccacgtctgccctggagcacttatgttttgaccaaggacatatgctattcctgtgtgacatcttgacaatatgagatggacattacagctcaggatgacaacaaaaagtaagtccggattactgccgtgagggatgtgggggaatggcagccaggtggtctgtagagagaggttgggaaggctggcagaaaagacaaggattaaaaaagacttagcccaataatccaaaagaaaaatgagcaaagattcccaggaaaggaaatccgagcagcccttagacataggaaaagatgcccatccttgctaaggggagagaaagacaagtggaaaccacggggctgtatcgttgtccatgtgcagtggcctggcagagaaaaccacatgtgcatgtaccctgtgagggcgaggccgtgggacacaggcaggctccctacatagtaggtatgattgtcaactgccatagtctcctgggaagggaatttggcagtgagaccaaaatgagacacgcccatattctcagacatagaaattccaattctggatttctcctctggtgcacttgcatggggttgaaatgatatctgcacaaagctagccattgaaacattatttgtaggagcaaaaagattaagttgtggagctgagaacaaactaaatgtccattaaaaggggactgtttcaatcagttacagtagagagatacaatgcaatattctgtggctaataaaagtctaacattgaagccggttgtggtggctcacacctgtaatcacagcactttgggaggccgaggtgggtggatcacctgaggtcaggagttcgagaccaacctggccaacatcatgaaaccctgtctctactaaaagtacaaaaaaattagccaggcatggtggcgcccgcctgtaattccagctacttgggaggctgaggcaagagaatctcttgaacccgggaggcagcggttgcagtgagccagcctgggagatagagtgagactcagtctcaggaaaaaaaaaaaaaaaaaaaggagtctaacattggctaggtgcaatggcgcacgcctgcaatttcagcactttgtgaggctgaggtgggaggatcacttgagcccaagagtttgaggccagcctgggcaacgaggtgtaacccagtctctactaaaaatacaaaaattagccagctgtagtggcacatgcctgcagtcccagctacctgggaggctgaggtgggaggactgcttgagcccaggagggtgtggctgcagcaagccatgactgccccactgtactcagcctgagcaacagagtgagaccttgtcttaaaaaaaaaaagaaacaaaaaagtctaacagttgagtgtgctgggcattattttattttaagtcttgtgtgtttcattactcaattatctcatgaatgctgaagtagatatttgggtatattgtcaccttcacttcacagatgaggaaactgaggtacaaaaaagggtagtaatttgcccaatgatacacagctaataagtagcagggtcagtcttaggtgagaaaaatcacagtgtagaacagtgtgtatagcatgctcccatactgagtacaaaagacagtaaaagaggccaggcgcagtggctcacgcctgtaatcccagcactttgggaggccaaggcgggtggatcatgaggtcaagagatcgagaccatcctggccaacatggtgaaaccccgtctctactaaaaatacaaaaaattagccgggtgtggtggtgggcgcctgtagtctcagctactcaggaggctgaggcaggacaatcacttgaacctgggaggcggaggttgcagtgagccaagattgcaccactgcactccagcctggtgacagagtgagactccgtctcaaaaaaaaaaaaaaaaaggcagtaaaagatagggctgagcacagtggctaatgcctgtaatcctagcactttgggaggccgaggtgggcagactgcttgagcctggaagtttgagaccagactgggcaacatagcgaaactatgtctctacaaaaaaccccacaaaacaaacaaacaaacaaaaaatatggtgggcatggtggtgtgcacctgtggtcccagctacttgggagactgaggtgtgaagatcacctgagtccagggagtttgaggctgcattgagctgtgattgtgccactgcactccagcctggccaacagagtgagaccccatctaaaaaaaaatttagaaaagagcaaaaaaaaaaatatatatatatatttttttcatatatataaaaacatatatattttttcatatatataaacatatatatttttcatatatatataaacatatatataaacatatatgtatgtgtatggatatatatatgtgtgtgtacggatatgcatgtatgtttatatatgctcgtattggtttagaatatctttggatggagacaggagaatctgagagtctatgaactgtgggtgcctctggcgacagaaattcagtgcacggaagacaagggagggagcaagatttcctttacgctacatagaattctatacctgctaaacttttgcaccatagatatgtgatatctatcaacacctttaaatccttctttctttttttgcatcccatccccaacagctttaaatctataatttaaaaaaaattaaaaatgtaatgggagggagcttcaggtccatcttacaggccgtctcttagcttgtaatgtccaataggaaaaccactagtttccatctttccaatatggaaacacagccactgagcagctgaaatgtgccatatccggattgaggtgtgctgaggctggaggctgcaggcagtgactcacacctgtaatcccagaacttggggaaaccaaggcaggtggatcacttgagctcaggagttcgagaccagcctgggcaacatggtgaaaccccgtctctactaaaactacaaaaaaaaaaaaaatcgccaggtgttgtggtgcctgcctgtggtcccagctacttggaaggcttaggtgggaagatcacttgagcctgagggccagaggttgcagtgagcctagactgcaccactgcactctagcctgggtgacagagcaagaccctgtctcaaaaaaaaaaaaaaaaaaaaaaagatgtaagagatgtgttgtgagtgtaacatacatgctgaatttcaaagacttagtataaaaatggcgatttcggccgggcgcagtgcctcacgcctgtagttttagcactttgggaggccgaagcgggcagatcacttgaggtcaggagtttgagaccagcctggccaacatggtgaatacaaataattagccaggcgtgatggcgcgcctgtaatcccagctacttgggaggcgattattactaaaaatacaaaaattagctgggcctgatggcgtgcctgtaatcccagctacttgggaggctgaggcaggagactagcttgaacccaggaggcggaggttgcagtgagccgagattgcaccattgcactccagcctgggggacaagagcgaaactctgtctcaaaaaaaaaaaaaaaaaaaaaagcaaaatatcaaattcataatttcttttttttttttgagatggagttttgctcttgtcactgagactgaagtgcaatggcaccatctcgtctcactgcaacctccacctctcgggttcaagtgattctcctgcctcaacctcccaagtagctgggattacaggaatgtgccaccatgctcagctaattttttgtatttttagtagaggtgggttttcaccatgttggtcaggctggtctcgaactcctgacctcaggtgatccacccacgtcagcctctaaaagtgctgggattacaggtgtgagctaccgtgcccagcctcaaattcataatttttatattgcttgtatgtatgatgatattttggatctactgagttacataaaagtctatattattaaaattaagtccacttgtcactttttacactttttgataaagctagtagagaactattcacagtaagcaagatatggaatcaacccaagtgtctatcaatgaatgagtgaaaaaaatgtgctacatatgaaatgttattcaggggacaggcacagtggctcctgcctgtaattccagcactttgggaggctgaggtaggcagatcacttgaggccaggagttcaagacgagcctgaccgacatggtgaaaacccatctctactaaaaatacaaaaattggccgaacatgatggcacatgcctgtgatcccagctactcgggaggctgaggcagaagaatcgcttgaacccaggaggttgaggttgcagtgagcagagatcgcaccactgctctctagcctgggcaacagagggagactttgtctcaaaaaaaaaaaaaaagaaaaaaaaagaaaagaaagaaaaagaaataaagaaatattatttagcaataaaaaagcatgaaattctgtcatttgcaacaacatgaatggaactggaggatattatgctaaatgaaataaaccaggcacagacaaggcagatacaaatattgcacgttctcacacacatgcgggagctaaaaagaaaagaccagccatgttgaccaggctggtcttgaactcctgacctcaagtgatccatccacctgccttggcctcccaaagtgctgggattacaggcatgagccactgcgcccagcctgaacctactgtcttctgggataaaattcttcctgagaccattctgtctgtttaaaagtagctagacatggatgtcaggagttcagaatctaattatttaaaaaaacaaacaaacaaatgccatcttgtcttcttggtttacagagacttaacagaaatatacaaagtacgctttcctctcattactttactttcaaagtttgaccagatctttacaaaggttgttccgtatgccacaccacctgataagggagaagtgatagtttaaaatagagaactgggttgggcgtcgtggctcacacttgtaatcccagcactttggtagactgaggtgggtggtcaggttgagctcaggagttcaagaccagcctgggtaacatggtgaaaccccatctctactaaaaatagaaaaactagctgggtgtggtggtgtgtgccttgtagtctcagctactcaggaggctgtggtgggaggatcgcttgagccctagagaagaaggttgcagtgagccaagatcgcaccactgcacttgaacctgggcaacagaatgagaccctgtctcaaaaaaaccaaccaaccaaccaaccaaccacccaaccaaccaaccaaccaaccagagaactgaattgttggtgttaccatctagtttataaacttaaagcttgagacagtctttcccttgggattttatttttttcttagttgaaagaatgaccttataataaaatggtaacaataatgacagaaatagctaacatttttgaagcacttgctacaagccagccattgtgcaaagtactttcttgagtaaaactaggatcacaaactggggtgttatgagcccatctattctatgaggtagatctctttgttaggcccattttacagatgtggaaattgaaatttagagagggtgggtaataatattggaagtcacaaaacttaagcttgcattttttttgttttttttgagacggaatcttgctctgtcacccaggctggagtgcagtggcgcagtctcggctcactgcaagctctgcctcctgggttcacgccattttcctgcctcagcctcccgagtagctgggactacaggcgcccgccaccatgcctggctaattttttgtatttttagtagagacggggtttcaccgtgttagccaggatggtctctatctcttgacctcgtgatccacccgcctcggcctcccaaagttctgggattacaggtgtgagccactgcgcccagcctgcttgcattctaactctatcactaacatgctatagagctgtttacacataacttcttggcagtaggttgaattgtggtcccctaaaagataggtctaagtcccaatcctcaatacctgtgaatgtgactttatttggaaaaaaaggtctttgcagatgtaataaggttaaggatcttcagatgatatcctggattaactggatggactctaaatccaatgacaaatgtccttataagaagagaagacatggctgggtgtggtggctcatgcctgtaatctcagcactttgggaggccaaagtgagagaggagaaaggaagaaaccggtcaggcaggcagttagggtgggttctcagctgaattctttcaaaccaaagaacagccggaaaaatcaagctgcaggtacagataagggaacttgcataggggggcttgtgcacgttcccttatctgtgcccgcagcctaagacatgcccacagctgcacagataaaaaagtctacacaagtgacttgcctagacatgcccacaatgaaaatgccgtcccctgacacatgtgtggtaagaggaacaaagtgatatggagtaactcgagctaagggcctgcaggtgcattaggaggacagggtggagctaccagaaattcgtgccttatgcaaatgatatgaccattcctcatcagcttcttataaaagcctttgcattcaactgtaaaaacaggaacccagccaggtgcagtggctcatgcctgtaatcccagcactttgggaggctgaggtgggtggatcacctgaggtcgggagttcaagaccagcctgaccaacatggagaaaacctgtctctactaaaaaaaaaaaaaaaaaaattagccaggtatggtggcacatgtaatctcagctacttgggaggctgaggcaggaaaatcacttgaacctgggaggcagaggatgcagtgagccaagattgcaccattgcactccagcctgtgcaacaaaagcaaaactttgtctcaaaaaaaaaaacccaggaaccctctttcaggccccctctttacagtggagagctttcttcttttgctattaaacttttgctccaaccttgcactttgtgtccatgctccttaattctcttggttgtgaaacacagaactccaggttatacctcacaatgagagactgctacattgtggtgcctgggtgagactgtaacagaggcaggtggattgcttgagcctagaaattggggcagcctgaacaacatagcgaaaccctgtctgtacaaaaactacaaaagattagccaggcatggtggtgcactcctgtagtcccagctacttgggaggctaaggcacaagaatcacttgagtctgggaagtcgaggctgcagtgagctgtgattgtgccactgtattccagcctgtgtgacaggggagactctgtctcaaaaaaaaaaaaaaaaaaagtaaaaagcaaaaaaaaaaaaaaaagagggacacacacacacacacagacacacacacacacacacacacacacacagcaagaccatgtgaaggctgaagcagaaattggactgacgcatcctcaagtcaaggaatgcacggagccagcaggaactggactagatgaggaagaattttcccctggaggtttcagaaagggcacggccttgctgataccttgatttcggatttttgttctccacaactgtgagagaatacattcctgctgttttaagccattcagtttgtggctatttcttatggcaacccaaggaaacaaagacaatcactataggcaaatcactctgggctttgattttctcccctgtgacgtgtgaggtttgattatactggtggttctgaacccaagaccatgggccaatctgtgagggggaatgtatagaatatttacatgtcagctggagggtctcaatcaggggtgcttttacctccagaaaacatttggcaatgcctggagatatttttggttttcacaacttgatgggaaggggagaggatgggattactattggcatttagagggcaggggccagggatgctgttaaacaccctacaatgcacaaccaaaaattatccaacccaacgtgtcagcagtgctgaggttgagaaaccctgatatatgcagtcatccctctgtatccatgaggcactggtttcaggagtctcctgtgaacaccaaaatgcacagatgcttaaggccctgctataaaatggcctagtatttgcatgtaacctacacacatcctcctgtatactctaaatcatctctagacttatttatttatttatttagagagggagtctcactctgtcacccaggctggagtgcaagggcacaatctcagctcactgcaacctctgcatcctgggttcaagctattctcctgcctcagcctcctgagtagctgggattacaggcacccactactacgcccagctaatttttgtgtttttagtagagacggggttttaccatgttagtcaggctggtctcgaactcctcacctcaggtgattcgcctgcctcggcctcccaaagtgctgggattgcaggtgtgagccactgtgcccagcctctagattacttataacagaggtaccagtccatggcctgttaggaaccaggctgcagagcaaaaggtgagcaacaggtgagcaagcaaagcttcctctgtatttacagtcactccctatggcgcgcattaccaccggagctccgcctcctgtcagattagcggccacattagattctcataggagtgcgaaccctattgtgaactgtatacatgagggaactaggttgttgatgatctgtcgctgtcttccatcactcccagatgggactgtctagttgcaggaaaacaagcttagggctcccactgattctacattacagtgagttgtataataatttcattatatattacaatgtaatgatagaaataaagtatacaataaatgtaatatatttgaatcatcctaaaaccatccccctaccagcgggtctgtggaaaaattgtgttctgcgaaactggtcccttgtgtcaaaaaggttgggtaccgctgacttataatacctaatacaccaaagtgagtggatcactcgaggttaggagttcaagaccagcctggcccagagggtgaaaccccgtctctactaaaaatacaaaaaaactagctgggcgtgatggtgcacacctgtcatcccagctactcgggaggccgaggcaggagaattgcttgaaccagggaggcggaggttgcagtgagccaggattgtgccattgcacttcagcctggtcaatagagcaaaattccatctcaaaaaaaaaaaaaaaaaaaactgaaaacaaatacagtgtaaatgctatgttaatagttgtttatacggcgtgttttatgtatatgattttttattgtagtctttatttttatttttattttttcaactattttccagccctgattgtttgagtctgcagatatggaacccatggatctggagggccgactgtactatgtgctttttacaagcaaaatgttattgaggccaggcctgctaccatgctcataataccagcattttgagaggccaaggccagaggatagcttgagtgcaggagattgagaccagcctgggcaacatagtgagaccctgtctctacaatgacaacaacatcaacaacaacaacaacaagttttattgaatcttcacagctacccccttaggcaggtattattagtactacttttcctattttacagatgaataaattgtaactaagagaagtgaactgatttctccaaggctacagaactaggaggtggtagagctgggatatgaggttttagttttgttttgtttgtgagatggggtgtcactctgttgcacagggtggagtacagtcatgtgatcatggctcaagtgatcctcctacctcagcctcccaagctgggactacaggtgtgcaccatcacacatggctaattgttgtattttttttgttttttttttgtagagacaaggtctgtttgtgttgcccaggctgttcttgaactccaggctcaagcaatccaccagtattggcctcgctaagtattaggattacaggcattagccactatgctcagtctgccttttttttttttttttttttgagacggagtctcgctctgtcgcccaggctggagtgcagcggcgtgatctcggctcactgcaacctctgcctcccaggttctagcgattctcctgcctcaacctcctgagtggctgggactactggtgcgtgctaccacgcccagctaatttttgtatttttagtagagacggggtttcattatgtttgccaggatggtctcaatctcttgacctcatgatccgcctgccttggcctcccaaagtgttgggattactggcgtgtgccaccgcacctggccgagactgggtcttaaaaaaaaaaaaagaaagaaagtaatgttacttttatgaaaaaaaaaaaaatttccaaaacaaaaaatttagtgaaaagagtaacattttttgcttcttttttcttgctaatccctctaatgccttgctttatacaagacggccagatacacacagcagcttctacatttactttgttgtgatatcatatgtcatgcagcctctggaaaatcccactgtacttgtgattgactacaagtgaaaatgataaataaaggcttagtattattattatgaaagagtcttaatcttgtgaacttcctgaaaaagatgttcctgaatagtctgctgaccgcaattctagcattctctcctaaaagatatagagaagatggtagaagaagatgggaggagatggatctccaatccagtgtctccccgtattcatcatttgtgtaccaccttcacaatttctgccaaatctaaggagtcaatgttttacttaatacgcatataggtaaaacaatttaactcatgtcctttcctttatacaaatgtattttcacaggaaactttatatattactattatgaatggagaacttggtattcattattaaacagcaggtaatggcacaaattaatttccagaaaagaaaaaaaattctaggccagatatggtggctcatgcctgtaatcccagcccttttctgggaggctgaggtgggaggaccgtgtgagcccaggagttcaagaccagcctgggcaacagagtgagatcccatctctacaacaatgacaagttagccagccatggtggcacacatctgtagtcccagttgcttgggagacgagatgagagaatcccttgacctcaggagttggaggttgcagtgagctgagactccgtctcaaaataataataaataaataaataaaataaaattctagggaagcagtctaatctgctaaaggctgtgcagctggggcttgctgtctgttcaacaagggaaattagttaagtgtggagaggtgataaagatctattagcaccaaacagagactttctccttaatgtaatccgaaagattgaagatgaacccctgtagatttattgtgtttttttttttttgagacggagtcttgctctgttgcccaggctggagtgcagtggtgcgatcttggctcactacaagctcagcctcccgggttcacgccattctcctgcctcagcctcctgagtagctgggactacaggcgcccaccagcgtgcccgtctaattttttgtatttttagtagagacggggtttcaccatgttagccaggatggtcttgatctcctgaccttgtgatccacctgcctcggcctcccaaagtgctgggattacaggtgtgagccactgcgcccagcctatttattgttattttatttatttttatttttttgagacaaggtcttgctctcctgcctcagcctcccaagaaactgggattacaggtgcgcaccaccatgcccggctaatttttgtattttaatagagatgaggtttcaccatttgctgagactggtctcaaactcctggactcaaccgatcctcctacctcagcctcccaaagtgctgggattacaggcatgagcaaccacaccaggccttatagcattatttaatgccacatccatgcaccatctaaattatctagcttatggacaataataatcttcagaccacaccttgcagccattcctcactttggggaaactggcactgccagagtttctcaaagcattttccatagtgatttgataggcattaaactgatctcctaatccaagacttttttcaatccttatgcactgaatgaagaacagtttcacttttttaggaccaaagattgtttaccaataacttacctaatattaaaatatggttttaatgcccatttgctttagggcaaataggagggttataaaacctcactggatggatccaagaggagaaaaaaaaagattggctttaagggaaaaacaagaatgcctaattagctttttgttttgtttgggtgacatcacatgtatcattaggcttagaaagttcatttgccaccttatttgtatgagtttttgagttccttccatatctattttcctgtattggggcttttttttttttttttttttttttttgagacggagtctcactctgtggcccaggttggagtgcagtggcatgatctcggctcactgcaacctctgccttcaggttcaagcgattctcctgcctcagcctcccaagtagctgggactacaggtgcgtgccactatgcccagctaatttttgtattttttagtagagacaggtttcaccatattggacagtctggtcttgaactcctgaactcgtgatctgcccgcctcggcctcccaaagtgctgggattacaggtgtaggccaccgcgcccggccgcgttggggcttttagaattgaatttactgtctgtgagagttctcttctatttcaattttagggctaaagaatgtggttttttttccctccaggcaaatgagattaaataaatatttaaattttgtgtgaagtttatttaacattttccactctttgctattgcttaagtgcaaagttttgtctttttttaaacattataattgctacttagaattctaagctgtaattttgctgttatgtaaattacacaacttcagtagtaaaaccaagcaaatagtatttattccttcctctgccttggaaactgattccttctgaaaataattgcagaaactaatgaaagcaagatccagttcctgcctagatttggctggtctgattttaagccactccccacaggaaataacagataaaatgatgcaatactagctagcattcctggctgtttctgacaatccaggagctatgtgactaatatatcaagtgaaaaaaatatttccttgattaaagtcataataacatattatgtgtaataacacagggagtatagatgactcagattccaggaataatagaaattggtggctcagcaacttaaagcagctagaaaggattgttatgccacatgggggttggagaagggcttgccaattgcacactgaagttaaacaaaagcctaacttaatttttattcctggttaaaaaaaagtctattatgtacatccagccaaaaaaccagtgccttaaacaagataaatgcgtattttctctcaattaaacactacataggtagtctaaggcttcaatgactctccttggtcccaagctgcttcttttttaatttttttgagatggagtctcgctctgtcgcccaggctggagggcagtggcgcgatctcggctccctgcaagctccgcctcccgggttcacgccattctcctgcctcagcttctggagtagctgggacgacaggcgcccaccataacgcccggctaattttttgtactttttagtagagacggggtttcgccatgttaggcaggatgtctcaatctcctgacctcgtgatccgcccgcctcagcctcccaaagtgctgggattataggcgtgagccactgcgcccagctccaagctgcttctttcttggttctctgctttgcagagtcaaatgacctcattgccgaagatggcggcatccaagttccaggcagcaagatggagaaaagaacaaagagaaagcaaagatacccacccgaggcttgacacttccatttatatcccattggccagaacaaagtcacgtgaccgtacctaagctacaagggaggcttggaaaggtagcgtttctttctgaaaaaattcagccctgctgagaattcaattccatggaagaaagagacaggatcttgacaactagaactttcattaaaaaaaaaacaggccgggcgcggtggctcacgcctgtaatcccagcactttgggaggccgaggcgggcggatcacgaggtcagaagatcgagaccatcctggctaacacggtgaaaccccgtctctactaaaaatacaaaaaaattagccgggtgtagtggcgggcacctgtagtcccagctactccagaggctaaggcaggagaatggcgtgaacccgcgaggcagagcttgcagtgagccaagatcgcgccactgcactccagcctgggcgacagagcaagactctgtctcaaaaaaaaaaaataataataaaaaaaacaggccaggcgtggtggcccactcctgtaatcccagcactttgggcggccgaggcgggtgtatcacctgaggtcaggagttcgagaccagcctggccaacatagtgaaaccctgtctctactaaaaataaaaaaaaaattagctgggcgtggtggcgcgcaactgtagtcctagctactccggaagctgaggtaggagaatctcttgaacccgggaggtggaggttgcagtgagctgagatcacaccactgcactccagcctgggtgacagagtgagactctgtctcaaaaaaacaaacaaacaaaaaaccaaaaacaaaaaacctttttctttttcttattatttttttgagtcagagtcttcctttgtctcccaggctggaatgcagtggcactatcttggctcactgcaacctctgcctcccaagctcaagaagtcctcccacctcagcctcctgagtagctggaaccataggcatgtgccacatcacctggataatttttttgtgttgtttgtagagacagagttttgccatgttgcccaggctggtctagaacttctgaggtcaagcaatcctccagcctcgtcctctcaaagtgctgggattataggtgtgagccgccaggcccagctgataactagaactgtctaccaaaacataattgcctttctgggcttagcccagagtttcatgtagataaaatattcattaattcatttagtcattcaattgcttaattcaataaatatttatttatttttgagacagagtctcgctctgtcgcccaggctggagtgcagtagcatgatcttggctcactgcaacctccgcctcccgggttcaagcaattctcctgcctcagcctcctgagaagctgggactacaggtgcaccactgcacctggctaatttttgtatttgtagtagagatggtgttgtgccatgttagccaggcgggtcttaacctcctgacctcaggtgatccacccacctcagcctcccaaagtgctgcgattacaggtgtgagccactgcgcccggccaataaatatttattgagtacctagtatgtgccaggcactgttctatgggctgagatatactggtaaataaaacaaagtcccctgtcctcttggggcttacatcctagcaggaagggaaaaacaataaataataaatataagtagttacattactgctgtggactaaatgtttgtgcccctccaaaatcatatgctgaaattctaacccccagtgtgatggaattaggaggtgggccctttgagaggtgattacatcatgagggtggaggcctcatgaatggaatgagggcccttattagaagagacacaagagcttgctcttgctttctgctctctgctatgtgaagatactagaaggtggccagctatgaaccaggaagtgggtcctcagtagacactggatttggcagtgccttcatcttggacttctcagccttcagagctgtgacagataaattcttgttttttaagccacccagaggccatgccagaggctcatgcttgtaattctagcactttgggaggctgaggcaggaggattgcttcaccccaggaggttgaggctgcaatgagccaggatcatgttactgtactccagcctggtaacagagtgagatcctgtctattaaataaataaagccacccaatctatggtaatttgttatagcaggctgaataagctaaaacaattacatagtgtattagaaagaataagttaatagatacaataaattatgtttttttttttttttttttttttttttttttgagacagagtcttactctgtcacccaggctggagtacagtggcacgatcttggctcactgcaacctccgccttagcaattctcctgccttagcctctgaagtagctgggactacaggtgcgcgccaccacaccgagctaatttttgtatttttagtagagatggggttttgccatgttggccaggctggtttcaaactcctgactttaggtgatccacctgcctcggcctcccaaaatactgggattacaggcatgagccactgcgtctggctgatacaataaattatcacagtaaaaaagaaaaatgaggaaagggatgtggaagtgaagggaggtggtggtaactttacatatgtggtcaggggttgtcctcattgagaaggtgacaattgtgcagactcaaacaaagtgagggagtgaggtctgcagaactccaggggatgaggcttccgggcagagggaacagccagagcgacgggcaaaggtgggagcaggactgatgtggggaaagaggcagggagaccagagctggctggagcagaatgaatattgacgggagtagaggaagctgggaatattgaggggagtaggggaagtcagaggaagctggttcctctagggtgggctcttatggctagtaaggactttggctcttactttgtgtgaaaatgggagctattgcagtgtttggagttgtagaattctaaatgcatagtgtttataaataaatagtcatttctctattggagagagggctaaacatttaataactgctggggtgcatcactttaaaagtttgaagaccgctagctggacctattttctgcatctatgtaacaacagctgagaaataatgccattctacttcactaacttttctttctttttttttttttttgagacagagtctcactttgtcatccagggtagagtgcggtggcatgatctcagctcactgcaacctccgcttcctagattgaggcaattctcctgcctcagactctcgagtagctgggattacaggtgcccaccaccacacacggctaatttttgtatttttagtagagacggggtttcaccatgttggccaggccggtttcaaactcctgaccttagatgattcgcccgcctcggcctcctaaagtgctgggattacaggcatgagccactgcgcccagtactaacttttatttctgatcaaaatttcatttatgagctatattggacaaccctgggtggccataattattacattcatttacatgtagtgggagatcagtgtggcccagtactcttctaagtcctttgttcagaagagcctgttgaatcctcacaaccactctattattattacccattttatagatgaggaaacagagaggtgaagttacttgcccaaggtcacacagctagcaaggggtgaagctggagctgaaccccaggcttgtgtgtagcccacgctcttcacactatgccaaactgcctctgagatgattcagaggcttggtgtatcccataaaccaaatgaaccaagaaatgtattcaacagtggcaccctatttaagcctggtggaagcaaagcactgctctgaacagcaaggagggctgccacctgccctttctggtctgcaagactttttttttttcttttttggagacagagtctccctctatcacccaggctggagtgcagtggcgtgatctcagctcactgcaacctccgcctcctgggttcaagcaattcttgtgtctcagcctcatgagtagctgggattacaggtgcatgccaccacacctggctaatttttgtatttttagtagactgggtttcaccatgttggcaaggctagtcttgaactcctgacttcaagtgatccgcctgctttggcctcccaaagtgcagggattacaggcgtaagtcatcacgcccagccaaggtctgtaagtcttgatgttgataggatttgctgatccaacatctgagagtctgtgtgtaggactggacatgtccttgaggatcatgatgatggcctcatgttacctggtgttcctggcagaatggcctcattcaagtccagcttcctgggtcttcctctgtccttcatgctgtccttcttatagcttgctacttaaaatcactactaatatcatgtccaactgaaatacagtagagaataaagaatacaggcaagccttggctcagggaagacttgggtttgaattttggccctggtgcttcatagctgtgtgaccttgggcaggccatctaacctctgagccttaggtccctcagtgtggatcttacctcagaggttctggggaggattaattaagatcatgcatgtgaaaagcacataatagaagctccacagatgtttcctattgtcacttttaaacctatgtaacccttgtactattttcctgtaaaacctgaatataactgttcagaaaagcagaaaactcaaattataatccagaaatatttgtacttcaataacttgagatgctcctgccctcccccgctctagcagtcagttctgctataacctttattgtgaaaacacagatttgttccaattgactggtatattagggagcaatagcatctatgaacataacatacattttgcatttgcttatgtgcaagttcatttgcaggaaacactagctgaatactgaaaactgcacccaggtaaacagaatcacataggtatacacaaaatgcacacacctatacatctccagggacttggctcaccacgtgttaggagccacactcatctatacctggcctgtctcatttcagataatcctcaattgcttcacgatggcccacaggctgcaatttttttagaatcatatttccacaagcaaacttgaggactttttaaaagtaaagtgccattaatcttagcgtttatatacttttgaggaatttaatatgtgtaaaactgtgctaaaatttttattgtgtgtgtgtgtgtgtgtattttgagacagggtcttgctctgtcacccaggctgacatgcaatggtgcaatcatggctcactgcagccttgacctctcacactcaagcagtcctcacaccttagcctctcaagtagctgggatcacagtcacatatttgtatttttagtagagacagggtttcaccatgttgcccaggctggtctccgactgctgagctcaaacaatttgttcgccttggcctcccaaagtgctgggattacaggtgtgagccacccaccgtgcctggccatgatttttgttaagttctcatcttttaaaaaatgtgtcactgatgaggtttttgagtgtaggccactacccctatttttccataagccctgtggtttttactgtacaatgttctttgcacagtgatttttaggaatgcatgtgtcatcttatagaactgactgtgctacgaagtgaattacatgttcattgtagaaaaattagaaaagtgcggccggatgtggcggctcacacctgtaatcccagcactttgggaggccgaggcgggaggatcacctgaggtcgggagttcaagaccagcctgaccaacatggagaaaccctgtctctactaaagatacaaaattagctgggcatggtggcacatgcctgtaatcccagctacttaggaggctgaggcaggagaattgcttgaacctgggaggcagaggttgcagtgagccaagaacataccattgcactccagcatgtgcaacaagagcgaaattctgtctcaaaaaaacaaacaaacaaaaaaaaacaaatgcaacaatagggattccatgcattaaatctatacctacaactttacttttataggctgtactatattttattgtatggatgaaccccaatttgtgtttaaaaacggtatttttttttctgattttaaaaagaatgcatttgatgtaaataaattcaaacattctagtagtctatcatgtaggaaggagaggtctcccatggtctcaccccaagcatccatttgcctatctatctggtaaatatccattgagaattcttcctatgctgggctctgggctaaccagaggattcaaccgaggaaacaagcaaacaacaggcacagaagctgttctcaaggagccaacagtatagtaagagtgaaaggtattaaagagtctcacaaggcaatataaaattatatgatgtactaagtgctttgtggaaaatgtgcaacttgcactgagatgctaccatgggagacgaaggggatgtgtttgtgtgtgacgtgtctgaccacgcctccctaaactgatgctactgagagggaccactggcaaaagcataatgcatattcatcctgtttgatttttctgcaatgtacacactaatgtttgttcttttccaataacagaatcatgtttattaatttgtgtaacactcacctgtttttgcctaacaaattacccaaggcagctttccaaggccaaacagcacagtaggtaagatcctggcctctggattcagatgagcctgggttcaaatcctgactctgcctttcactagctgtgtgatcctgggcaaggtcccttactctgtctgccttaatttcttcgtctgcaaataggaatgacagaagagtctctacccctttcaaagtgctgtaaaaagattaaaaggagatgataaatgtaaaattctcagcacttagcatatgttagatactattttaatagttgtgtggtatttgcttgtttaaatcagtttctcggtgtctgcagtactgacattttgaatcagataattctttgtggttggggctgttctgagcaaaggacgcttagcagcatccctgctctgtacacattggatgccagcggcgtcaccccaacttgcgacaacaaaaaatgtctccagacattaaaaatgtcctagggggtggagtggagggaggcaaaaattgtccttggttgagaaccactgctttaaatgtacacattttaaatatatacatcggctgggtatggtggcttattcctataatcccagcacttttggaggccaaggcaggagaatcagttgaggctaggagttgaagacctgcctgggcaacacagtaagaccctcatctgcaaaaaataaaaatacaaattagccaggtataatagtgcacgcctgtggtcccggctatttgtgaggctgaattgggaggattgcttgagcccaagaagtcaaggctgcagtgagctgtgattgtggcattgcactccagtctgggcgacagagcaagaccctgtctctaaataaataaatacacacatatccataatataaaacatgtaatatggctgggtgtggtaatcccagcactttgtggggccaaggcaggcagatcacctgtggtcaggagtttgagaccagcctggttgacagggtggtggaaacccatctctactaaaaaaaaaaaaaaaaaaggtagctaggcatggtggtgcacgcctgtactcccagctactcggaaggctgaagcaggagaatcgcttcagcctggaaggcggaggttgcagtgaaccaagatcgcaccactgcactccagcatgggtgacagagcgagactgtctcaaaaaaaaacaagcaagccatgtaatgtgttatatatttaaatataataaagtgttatttattaaatataaacaaatactgtgtttatggtgaaggcattaaaatatgctgttttggcattttgactatttctatttacttacacacacacacacatatatatttttaagatggagtcttgttctgttgctcaggctggagtgcagtggcatcatctcggctcaccgcaatctctgcctcctgggttcaagcattctcctgcctcagcctcccgagtagctgggactacaggcgcgtgccaccatgcctagctagtttttgtatttttagtagagacggggtttcactatgttggccaggctggtcttgaactcctgacctcgtgatctgctggccttagcctcccaaagtgctgggattataggcgtgagccactgtgcccagccaactatttatattaaaggtatataaaaaataggtgtagtcctagctacttgggaggctgaggcaggaggatcccttgagccatggaggttgaggctgcaatgagctgtgattgcaccacgctgcactccatcttgggggacagagtaagactgtgtctcaaaaaaaaaaaaaaaaagaaagaaagaaagaaagaaaaagaattattatactgtatcttttttttttttttcgagacagagtcttgctctgtcacccaggctggagtgcagtggcgcgatctcagctcactgcaacctccacctcccaggttcaagagaatctcctgcctcagcctcctgagtagctgcaatcatagacacccaccaccacacccggctaatttttgtatttttagtagagatgggatttcaccgtgttagccaggctggtcttgaactcccgacctcatgatctgcccaccttggcatcccaaagtgctgagattacaggcgtgagccaccgtgcccggcctattatactgtatcctaactgtaccttttctacgtttagataggtttgaaggcacaaatactactgtgtcactactgcctatggtattcagaacaggcacatgctgtgcaggtttgtagcctaggaacaataggccatattctctagcctgagtttgccgtaggctacaccatctaggtttgtgtaagtacaatctaaaatgttcccacaacagtgaaatcgccaaatgacacatttctcagaacagaaatattattcctttttaaggaaaacataatgaggacagtcaaaaaaattgaagagaaacaaaaagccatgtatgtgggaaggagaaatctaagtaaacaaaaggcagtctcaaacataagtaaaagtgatgtggtttctaatttccaccaaagcaaaatgcggaccagatggggttgggggtgagccggccgcatagaggaatgcagtttgctttggggaaagaagctattttttgtgtttgtgtgtgtttctgtgtgggtgtctgtgggggtatttgtgtctgtgtgtgtgtctgtgtgtctatctcatttcagtcaattgactgaaatgtcgttatgcagcacatcactgtcaatgttcgtgtatcttttacgtttcagtttttatatcttatataatgtattacacttatatgtgaatattttatcttatccattgtagggagagtctatgtgtgtgtgtttgtgcgtgtgagcaacagaggttggggaaggaggaaatgtggccaaaacgattttgtggtcaatgaccctttggtaaaggcacacacaggcatgtttagaaacacttatgggaagaaaactatccccgcaggtacacacccactttcagatcatataaatctcacttttccccttacacaaaagatgcaggaagcacttaaggagggtgtctacccagcctgaacaatgagtcttttcctccccttgttccccatctgagtttctattcccaggggcagagtctggggctgggaagggctgcttgtcagggagcctgagggtgaaagcaaagaggctttggtctgtcctgttgaaggagtcacagacagtgggggatgctgatggacatcagtgataacagctggcacctaccatgccctgtcctaagcataccacatcaactggctcctttcaccctcagagaaagcccaggaagacaatataattatgcctattttacaggtgaggaaactgaggcaccgaaaggagaaatcacaggttccacagcttgcaagggacacagttgagatttgaacctagtcagctgcctccggagtccaagctttaccctagaccagtggatctcaggggtggtagagggtgtgtgggtattttgacccctagagcagcagtccccaatgtttttggcaccagggactggttttgtgaaagacggtttttccacagactggggttgggggggcgggaggatcgtttcaaggtgatttaagcacattgcatttattgtgcattttatttctatgattattacattgtgatatataatgaaataattatacaactcactataatttagaatcagtgggagccctgagcttgttttcctgcaatgtgatggtcccatctgggggtgatgggagacagtgacagatcttcaggcattagattctcataagtggtgtgcatcctagatcccctgcatgtgcagttcacaatagggtttgtgctcctatgagaatctaatgcccgcagttaatacagatgaatctttgctcacttgcctgccgctcacctcctgctgtgtggcctggttcctactggtctgtggcccggggttggggacgcctgcgctggaggacgtatggcaatgtttggagtcatttttagttgtcacgattggaggatgctgctaggatctagcaggtagaagctgagatgctactaaacacatcatacaagacgcacgacagctctctccccaccaaatcatccactgcaagtgtcaacagtgctgctgttaaaaactctgtcctattttaggaaaagactacttttcttctagaactctaaaaaattattttgtttgctctctaaattacaaatcatacatgctcattggaaacatagaaacaattagatgtttataaaggaagacctgaaagattctctccctagttccgcgccctgcggcaaacacttatcaacagtgtggcatattctgctgcagccttttctattacagacctttgttacattgtcagtctatctacttacatctttatctctttttctccccttttcaaaaatagaagcctacacatattttccttttttttttttttttttgagacaggttcttgctttgtcacccaggctggagtgcagtggcagatgtattagcctgttctcacgctgctaataaaatcatacctgggtaatttataaaggaaagaggtttagtggactcacagttccatgtggctgggcaggcctcacaatcatggcagaaggcaaaggagaagcaaaggcacatcatacatggtggcaggaaagagagcttgtgtatgggaactcccatttataaaaccatgagatctcgtgagacttattcactatcatgagaacagtatgggggaaatcgctgattcagttatctccacctggccctgcttttgacacgtggggattgttacaattcaaggtgagatctggggacacagccaaaccatatcacacaatcatggctcactgcagccttgaactcctgggcttaagtgatcctcccacctcagcctcccaggtagctaggactacaggcacacaccatcatgcccggctaatgttttgtattttttgtagagacaggatctcactatgttgcccaggctggtcttgaattcctggactcaagcaatcctcccatctaggcctcccaaagtgttgagattacaggcatgagccactgtgcctggtccacatcttctttcacatctttttcattcagtgctgaactccaaaccacaaactttgcacctgctgttctttctttctggaacagtcttcccccaggtatctgtagacctgcatccctggatgtattaaaatctgagcatatcttctccttaaaagggagctccctgacttccctctgtaaaccatttcctcttctaactcctccttttttttttagatggagtttcactctcactctgttgccaggctggagtgcagtggcgcaatctcggctcaatgcaacctccacccgctgggttcaagcgattctcctgcctcagcctcccaagaagctgggattacaggcatgcgccaccacacccagctaatttttgtatttttagtagagacagggtttcaccatgttggccaagatggtcttaatctcctgacctcgtgatctgcctgcctgggcctcccaaagtgctgggattacaggcgtgagccaccgcgcccggcctccacctcctcttcttacccggtgtgacttttttagtttttttttgcaggtctcctctctgacacgtgggcagatgcttcttagcttgtttgctggttgcgcccttcctagaatgctggctccatggtggcagaaattgtgtctgtctttcataatgtgtgtccccagcacctaaagcagagtctggcacctaatagacactcaataaatatttattattggccgggcacggtggctcacgcctgtaatcccagcactttgggaggccaaggtagggagatcactggaggtcaggagttcgagaccagcctggccaacatggtgaaacctcatctctaccaaagatacctttgggtgtggtggcacgcttgaacccaggaggcagaggttgcagtgagccaagatcatgccattgcactccagcctgggcaacagggtgagactctgtctcaaataaataaataaaataaataaaatttattataatcaacaaatggataaatgaaagaacaatgaatgtatcatatatatccgttgatgtccatgtatgcaaataaaaacatatctcattccctttgatggctacccaatattcattttactattctctctctccttttttttttttttttatttggacatgattggctctgtcacccaggctggaatgcaatggtgcaatctctgctcactgcaacttccacctcccaggctcaaacgatcctcccatctcagcctcctgagtagctgggaccaaaggcacacaccaccatgcccgcctaatttttggtagagacggggtctcaccatgttgcccaggctggtctcaactcctgagctccagcaatctgcccatctcggcctctcaaagtgctgggattacaggcctgagccaccgcacctggccattttactattttcaagttgatgaaaacataagttgtcgtattttttccttttgtgggggacaaatgggagtgattttatgaatcatgccacaatgagcatcttatacacatatttatacacttgtgcaggaatttctgtaggctagattcccagaagcagaattgtggatcaaatgtaaactttttatcagagttgctacaaatttgagttccaaaagtagaatgcccttttcttgtctttcctcatcaacactggataattagaactaacattaattaacactatgttctaagccctttacatgtgttaatctaattaattcttagataaatcagaaaatgataatagtaagtgattataggaaatgattatataggacatgctgaacactgtcctaagtgtttttgttttgttttgttttctgttttttgagacagagttttgctcttgtcacccaggctggagtgcaatggcgccatctcagctcactgcaacctccgcgttcaagcaattctcctgccttaggctcccgagtatctgggattacaggcgcatgccaccatgcctggctagtttttgtatttttagtagagacaaggtttcatcatgttggccaggctggtcttgaactcctgacctcggctgatctgccaacctcaacctcccaaagtgctgggattacaggtgtgagccaccaccccgggccctaagtgttttatgtacatcatctcacttagtccttgtaaaaatcctctggggtggatattattattattattatcattttacagatgagaaactcaagcatgaaaccttaggtctagtaatttctccaggatccgacagccaagaagtgggacaggccaggttggatcagaaagtccggttatagaatccttactgtaaaccacgcttctatcttccttctccatgggtaagagcaatgattgtctccattttacagagaggaaaactgaggtacaaagaagctaggaaacttggccaaaaatattatcaatctttttaattggtgcaaatgtgatgggtgagaaatggtatcttatggttctactctctaaagatatctcttattcttttcttctttgaatttgaaaacaatttaattccttatttggataaagtaaatttctcaactgataaaatatgtatcctgtttaaatataagtgtctgggctgggcgcggtgactcacgcctgtaatcccagcactttgggaggccgaggcgggtggatcacaaggtcaggagatcgagaccatcgtggctaacacggtgaaaccccgtctctactaaaaaatacaaaaaattagccaggcgtcgtggcgggcgcctgtagtcccagttactcgggaggctgaggcaggagaatggcgtgaacccgggaggcggagcttgcagtgagcccagatcgcgccactgcactccagcctgggcgacagagcgagactccgtctcaaaattaaataaataaataaataaataaataaataaataaataaataaataaataaataaatgtgtctgtaaaatgtgaattcttttgccatctagatccaaatcattaaaataaattcagatttctttttactcctaaaatgcctcttaatagggacagtcatggtggcttacgcctgtaatcccagcactttgggagaccgaggcgggcagatcacctgaggtcgggagttggagaccagcctgaccaacatggagaaaccccttatctactaaaaaaaaaaaaaatacaaaattagccgggtgtggtggtgcatgcctgtaatcccagctactcgggaggctgaggcaggagaatttcttgaacccgggaggcagaggttgcagtgagacaagatcgtgccattgcactctagcctaggcaacaggagtgaaactctgtctcaaaaaaaaaaaaaagcctcttaatatcattttttaattttgttgagattcataggcgcgagccactgtgcctggcccatatttttatttttattttaaagagatggggtctccctatgttgcccaggctggtcttgaactcctggactcaagctgtcttctgacctcagctcccaaagtgctgtgattactggcatgagctaccatgcctggcgtccgtttttttttttttttttttgagacggagtggcactctgtcgcccgcccaggctggagggcagtggcaccatctcagctcactacaagctccgcctcccgggttcacgccactctcctgcctcagcgtcccgagtagctgggacgacaggtgcccgccaccacacctggctaattttttgtatttttagtagagacggggtttcaccgtgttagccaggatggtctcgatctcctgacctcgtgatccgcctgcctcagcctcccacatatttttaagttaaagtaatttaaagagacaataattttcttgagagataaatcgcaaataaattttttgagagataagtcacaaaaatatttgaatttgcaagtttataatagcctgaatgtaacatggtagtctgggtttgatcctagacaaggatattagtggaaaaactggggaaatccaggaagcctggagtttagttaatagtctttgtccaatattaatttcttagtttggacaaatgtacccttggtaggcaagatgttactgttaggggaagtgaggtgacaggagctctctgtattaactttgcaacttttctatacttctaacaattattccagctaaaaagtatattttaaatgagtgttgaaggctatttttcagatctgtaaacacactcccaatgcggttaggcaaacatgggaaacacctggccatggccacattatggtaaaaagaaaaaaaagatctctgtgatccttctgctggacaaaagggtatatttagcctcagattttttgcggtgacctttgcattctgaaatgaattagaggtttacgtgtcagaatgtaaagagcaggaaaccaggaagttgatggggaacgactttcctgttgtatttcacttgtttacatacagcagcatcaccgagagcagagattttgctagattatgttgacatcacatatccctgatccaccactgggggctgaaagcagcatgcaccacccccagccaaactgctggaaattcctgcatgaaatttcaatcgcatggtttagctgtattattattattattattagctgggttattattgttattattagccgtattattattatcattattttagctgagttatcttaatttgctctttttctctggctattttgatctgaaatgaattacttatcttttctcttgtgggcagtaaagaagttctttttgtctcaaatacaatctaagataaattttggaaagcaaaccatgctccttgacaaacaacttcgtgttcacctctcttcatggtaaacattggaaatgtgaacatctctgtttgtctctcgtttgttctttaacaaatgtaacattttcaatacagataacaaaaagtccaatttcagagaattctgcctatctagctcacccctctataccaggatcatcagcatcagacactcatatttgtaggatagacaaatgaagaggaagaaaatgtcatataatattcttgcatttaagatctttaggaaggataaaagcatatttctctgcaggaatgttaaagtagcatatttgacaatgtgattacaggagagtatgtgttgcctttaatattcgttttttaggaatagtctttattctaagccatttccatgttaatttgaggaagaggttattttccaccttatcactcaaatctgacgatgtttggcttctcagaaatatcaaaatgcttacattttgttttcattcgtgaaacaaatgtatgggttttggttgggcttggactcaaatggcattttaaaacaggagcatatgtttcgggagcaattagcgattgtttaatataacgaccctgcaggctggaaaggctgcaggtcagaattgttaacaggcaaagcaatgaaaaatagtaaagcattagcagatagcgtaaatagtcaaatttgacctccaaaggtcaagagagaactaaataatttggtcgcagcactgactgatttaaatcaatgcaatcccaatttccttttttgccggtttgcctttggtattccacggtctagtactcgccaggagtcaggagagagaacagggtagggtctactcagtgatataattttactaaatgtgggtggtttcgagagaaaaaatagccaaaagtatttcaaggaccaaatgaaattatttaaacagaacgccattgtgtctgtcctcttaactacttggttttgtttctctaaggatgatttatgatggtaacaccgatacaaatacataattaaccatgggagcattttgcatctcaggtttcccacattttttctcatttgtaggcttcttagatttaaaattatacctttaccctatgaaactgaaaaatcagcaaaattcgtaaattgctagaccaaataagtttttatcttttttaaagtgtgaaaaaatgatcccctgaattcttttggatttctacctaattttttttttttagtggaatgattccctccctcttgactgcttctgtcttctattttttcatgtaggactcttcttcgtcatccctcacatagataatatgtggcttactcaaatttatttttaaggtactatatcctgttttgatcaggaaaagtatattttaaagaaaaaaaaatcttttggtgattacaaaatcactttaagacccagggggaactatgcctcagtgacaaaacaaatttgccacaaatcattgtacaaaagaacagcaggacctaagcctaaactcggggaccgctcccattcatctttcatttgttttggaaactccaccctcctcctgccatgttcaatatctaattggcattctgacccttcagataactcaacatctgctactctgatgcatcttggaaactctttgttcccgtaaggcggagttcaaggggctctcttcactgatacacaagattcatgcatgctattgtgtacgcagcttctggtgctgaatggagacaaaacttttgcaagctaatatgaaaaatgaagtgactctcatattctaaccaaatcatcttcagcaggtttaaaattatgcatggctggacaagacagcagtgcattaaccaaacaattaagcttcgcttctttcataagcaatttaaggctggaatccacgtatctatttttactgtgacttgtttgcatattttggcctgatagcctttgtttttctctattatgaggcaacatatgtactgatgtttaatctcctaaaacagattatgtagatataaactaggatttttttttaagcagaatcacacaggtgattgatttttcaatgtattatttcattgaatccaagatactacaaactgtacattttagaattatttttaggtactataaagaaagaaaaacttatactaaccaatctgtgatatgcctttgattctaagacgtaggcctaatatctgagatgtaaaaatgtgaaaaaaaatgcatatctgggactgatgcaatttgctagtaggtgcacaccctcgcacagttttgtgggagagattatgcaatttatgtttctgcaatttaccaggaaacctgccatctgcttcagctgtgtttctttcctttggtggctgggttttgctgagggatgtccagtggctttcctctacctttcggttttcagactcatctaaggaagatcccctggtaccacttgctaagattgtgtaccctgggctgcaagtcagaatcacagtatgggcaactggtttccttttattattttactgagcagcttggtttagggtcagtaggattttattatcttctgggaagaattaaaagacccacaatgagctgagaaggttttcggtcctttttttaaaagtgtcagccatatttccccccataatacttgcatgtgaaagttatcttaagttttgtaccagcctagaagattctactagtctattgctaatagtttaggcttcaggagaagccaacaaaagggtatgagaaataatcaagccatcaggaatgtagggaagttttaccaaaaacaacaaaaaaacaaaaaaaatcaagtaactgggccgggcatggcagctcatgtctgtaatcccagccctttgggaagccaaggcaggaggtcacttgtggtgaggagtttgagactagactgggcagcaaagcaacagcccgtctctacaaaaataaacataaaaattagctgggggtggtggcacgaacctgtagtcccagctactcgggaggctgaggtgggaggatcccttgaggccagaagttccaggctgcagtgagctatgttcatgccactgcaccctcgcgggggtgacagagtgagactccgcctctaaaaaaataaaaatcaagtaactgattttttttccccttggtttaaatggtcatgaggggtgttatgttttggttcaaatctctgctctgcctttttctagctaggagacttttgggcaaaggtttgcatttttgtaatagggagcaatattcacctagcaagattaaatgagtgaatgcatataacatgtttagctgagtgttctgtgcatattgttaattgtcattattcctgcttttgttagacacagtcgcttttgacccaaagctgccaaaatttcatgctggttcccaaacagatgcactgttctcctgacatagcctggaattcctcaaagggtaaactctcactactgttattaggattattatgagtaatgtgcttttctttgtctctgtcagtccttccttcaaaactgtaaatcagtatttttctatatctagctgcaataactgcaaatcatcaggcaaaatgtctacatgtgctccctttcctctttctttctttctttctttcttttgaggtggagtctcgctttgttgcttagtctggagtgcagtggcacaatctcggctcactgcaaccttcgcctcccgggttcaagcaattctcctgtctcagtcttccaggtagctgggattataggcatgcatcaccatgcccggctaatttttgtatttttagtaaagatggggttttcaccatgttggccaggctggtatcaaactcctgacctcaggtgatccacctgccttggcctcccaaagtgctgggattatagacatgagccactgtgccaggccaccctttcttatttctaagtcctgtttatgagtattattttctagggcttttattgtttaaatgctggtctttctttcctaataagttgaaacagctacataatcaatgacctatcttttggtcttcatccatcattgtcatcttttgactatgagcattatttgttaaaatttctgaacagggtgaaacatgctgataatcagagattttgctttggcttgatacatttctgtgtgtgaacaactggggacaaaaagataaaagagacatggtttttgctggggagaaatgcatagtagggagggcaaaacccccaacccagctatttaatttatttactttttaggaccttttaaaacatctcattagccaccagacaggcagggctgggactagagggaggcagaaaatttaaggggctgtaaaaaaaactcagtaatcaagataaataatatttcattgcaatgttttgctctgccactttttagctatgcggctttggacaaattactcaccttttatgtctaatctgtcaaatggaaggaatgttcacctgagttgttatggattaaatgaggttcaacatttcctgatctgaaatgcttggagccagaagtacttcggttttggaatattttcagattttggaatatttccattatacttgaatttgaaaacctgaaatctgaaatctccagtgagcatttcctttgagtgtcatgtgggtgttcaagaaagcttcagcctttggagcattttggatttgtgatatttaaccagtaatacatacaattgctcagtgcccaacaaaagtccaagatgagcgaaattccaaaattttagataaagaacagaatctgtgagcaagatttcactgagtgagttttgaaaaaaatccaaatgggtcatttggagcaaaataactaacaaggattctgatgccaagtaagggcaggcaagcaaggcttgtgcggatcgtccttgtctcctcttttctcctctcctttgttaaaaacaggtatcaggctgggccgggcacggtggctcatgcctgtaatcccagcactttgggaggctgaggcaggtggatcacctgaggtcagagatcgagatcatcctggctaacacggtgaaaccccgtctctactaaaagtacaaaaaaattagccagacttggtggcgggcgcctgtagtcccagctacttgggaggttgaggcaggagaatggcctgaacccgggaggcggagcttgcagtgagccgagatcgcaccactgcactccagcctgggcgacagagcgagactccgtctcaaaaacaaaaacaaacaaacaaacaaacaaacaaacaaaaaacaggtatcaggctgggcgccgtgactcacgcctgtaatcccagcactttgggaggccgaggcaggtcgatcacttgagtcaggagttgaagaccagcctggacaacatggtgaaaccccatctctactaaaaatataaaaattagctgagcatggcgttgcctgcctgtagtcccagctacatgggaggctgaggcatgagaatcacttgaacctgggaggtggaggttgcagtgagctgagatcgcgccactgcactccagcctgggtgacagagcaagacttcatctgaaaaaaaaggtgaccggacacagtggctcatgcctgcaatcccagcactttgggaagccgagatgggtggatagcctgaggtcaggagttcaagaccagcctggccaacatggtgaaatcccatctctactaaaatacaaaaattagccaggtgtggtggcgggtgtctgtaatcccagctgctcaggaggctgaggcaggagaattgcttgaacctaggaggtggaggttgcagtgagccaagattatgtcactgcactccagcctgggcaacagagtgagactccatctcaaaaagaaaaggaaaaaaaaaggggagggggttatcaagcagtgcataggatctaaaatttgatttccttaagttcaaattctggatctatgacttattagctgggtggccttaagaaatttacttaacctctctgaaccacactttcctcatctgtaaaagaggggcaatgaaatagatctcacataaggactaaatgagatcgtctgtggagagcaagcactcagtcaggggcagcggtgttgctaacgagacagtgcaacccaaaaaagaaaaccatcatctcagtttactcagcttctgcttgccactgacggtgccggccaccactttctgaagggcgtctctgcctcatccatgcagataagattgtgttcatggccgggcgtggttgctcacacctgtaatcccagcactttgggaggcctaggcaggtggatcacttgaacctaggagtttgataccagcccgggcaacatagcgagatcctgtctctacagaaaataaaaattagccaagcatagtggcgtgtacctgtagtcccagctactcagaaggctgaggtggaaggattgcttgagcctggaagtttgaggctgcaatgagctgtgattgcatcactccactccagcctgggcgacaaaccgagaacttgtctcaaaaaaaagagaatgtgttcatgatttagtgcacttacaaagcatggccaggtcacagaaccaactgatgtagaactctgaattttcacaccaacactgacactttctggaacttttcttttttttgagactacaggtgtacaccaccacacccggctaatttttgtagtttttgtagagatggggtttcgccacgttgtccaggctggtcttgaactcctgagctcaagggatccacttgcctcagcttctcagagtgctgggattacaggtgtgagccacgcacctggcctctttggaacatttaaaaaagcttattattacaattattataattgttttggcaaaaatattcgaacacacctaaaagtagagtgaatagtactacggaccctcataggccattatccagattcagtaattaagattttgcaacacttacttcagagagtctcctctccttaccccacctttatattttaaagcatatcacactgtaggatgactatagttaatcaaaacatgttatatggtttcaaatagttagaaggaagatactgaatattcccagtgcaaagaatgatacaaagatgatggacatgactaactaccctgatctgatcactatacattatatgtatcacaacatcactatgtaccgcataaatgtgctcaattattattttaaaagtttttaaaaagtgtatcatataatttaaaaagttttttaaaaatgcatcattgggctgggtgtggtggctcatgcctgtaatcccagcactttgggaggctgaggcgggtggatcacctgaggtcaggagttcaagaccagcctggccaacatggtgaaaccctgtctctactaaaaatacaaaaaatttagccaggcctggtggcagatgcctgtaaccccagctactcgggagactgaggtaggagaatcacttgaacccggaaggcggaggttgcagtgacccgagattgcaccactgcactccagtctggggaacaagagtgaaactccgtctcaaaaaaaaaaaaaaaaaaaaaaagcatccttgacttcgtgtcattttaccctatacacttagtattcatcaatgtttttaaagtttattaaagaaaactcccacacaatgccattatcttgtccaacaaaacaaacaatgtttccttgatatcatctactacccaaaggtcctcagcatctcaaaaatgcctgctttaccctggatttgatggaatcaggatccaagcaagatctgccccactgcatttggttgtcaaatgaaacccttttctataagaactctcagcaggcaactgttgaatttctaaactcttcagtttctctggctcacaagcacagaacacaaacaaacaaacaaaatcccaacctatttttcaaacttgttattcaaggggaagagtgtcaagctagaggccctgcaagcagcagaaggggcggttaagaagtgtgttgggagagattgtgttccttcgcagcatggtgagcctcccagactggatccaacctcgtatccaggtgttgggcctcaatcccacttgagccgttgtttatcgccctcccgtggattaatcccctgtcagttaggccagagaagctctggagaaggcctgcgtagcatcccatgtgtcaaggccccctttgatacactttatctgcccttatcccttcagacgcgccatgactcctctgctggtcatggcctcggagctttagaatctctgcacagtgactgacatccctcctatggaggaaaggcaggggatttttcttttttggacggcaatcattgttgatctgataagatgtttttcagggaatcaaatgtcaaaccgggagtgctgtgagtccgggatgaagtagcagttacaggactaagcagctttgcctattcattttgactgcaaggacacctccttggtcttgtcgaaactgtggacctcattttgtttatttatttatttatttttggatggggagagggtgatccagaaaaagtgatgcatgaatacggtttcaaatccttgtgggaattaacacattgtcatatattcaaatttcaatgctatactatcataactattcacccgaggaaaaaggaaggttactgcattttgttgtacaataaatataaatgtagtaatgttaattaattaaatcaatgtggttggttgcatgttgttttttagtggtgactgctgctcttattagttttcatacatttaaaatgattgttttacaattttcaatcaaattttaattatacaacgaatgcataaatccaatttgttctgtaaaaacatgcatgcttcagaaataaagctaaaagtctttgatcaccatccctaaattcagtccccatccccttaagagggatcagttgctatcaggttgctatatacaaataacagacctttatttctatgcaagtacatccatacatatgttttaggcttaattcagaaattcttcctggagtcaatatatgtgtgcttcataatttttgcctcctgaagatcatggtaatgcatttcaggagctattgtcaaaaagtgttaatacaccaatttgttgatgcattgtacaaaatctagccagctgtacacatcttggcaggtgtacccaaatgaaccactcttgttccctctggaacaaaattggaattgttagacagaattccaatatgatactgaacatcaacatgtttgaacaaatgctgaaaatggcaattctctcacctccagccttaaatcttagattcctaaaattgaccatcgaagttgaatgaaaataaattttcctaaagcaaggagccccattcacctaacttctgccctctcctgttaataacattttgcattattttaccccctttattaaacatattgaagagaagatgaaactggaataagatcattcttaaccaatatgttttgagttttctagtgaaaaacagaaatcatttaacatgatttttatctgacacaatcttcaaaatttccccaagccaatttttctttttcgaatatatataaattctgctgcttttaagtgatacttgtccattattaaattcctgacgccgtgcatccctgccaaaaaaacaggattagagaagtaaaacagtcagacacagatgtttttaatttcctcctaatagaaagcatcagaaacccaagttcgcataattctaataaacataattatcactaacgtgtatttcacatatcattcaaagcacttggcatgtattatctcatttcttgtcaaaattaccctaggaggtagatactactactccagaaatgctaaatctaagcattgggtaaactggacagatctatgtcctccccttgtcagagctgacattttaggggcaaatagattaattaataagaaaacaaatgaatacaccaaatcctctcaaagagtgactagcactaagaagacctagtgggaccatcttttatcttcagaaaaacatggcatgcagtcatactgcctttctgtagatgaagaaattgaggcgctgacaaagtgcctaaggccacaaaggtgacaagcggcaggcagaactaaagatggcatctatgagtttgtaactttttgatgcaatttttgatgcatggaagattgcataattattattggatcccttctctttccccactaccttcccactgggaaaccaaataaagctatcccaacccaccaagtataatttttatatttttgtcaaagcaagagggtcaaaatgtttcaatcgctcaaccactatttcttgagtaacttctgtgtagttggttgcctggaatggtttagtgaactggacagacatactcacacagagtgcactgtctagtgggagatgtgacaggtagcctgcgaattaatgaaccagtacatatgatgaagagcaatgcatattatgaagaagtaaactgggaacgtgggtagaaaatgacttgagtgggtgcatgtgagggtttagcaggatggtcagggaaggctctctgaggaggtgaattctgagctgaaagctgaatgatgagattatgcaaaaaacgtgggggaagcgcattctaggatgggggattagcacatacaaagcccctgctgtgggaaccagcttggcatgttcaaggatagcaagaaggccagtgtggctgacagagggagggaggcagagagagaggccagatcggagggtgcaggtccttgtggacactctaaggaggatggaatttattggaggggccatgggagtgatacgatccaatgaacacaagttgtggtacaacacactgttgcatagtgttgacgtggaacatcccagatagtgaggaatttggcacaagaactgctgaatctcagggtctcaaaaagtatagctaagccctatctcctataggacacccacgcagggctcctagacaggcatcacgcagactccagtggctttgaacacttcatccaaatttatttattttttaaaatttttattcttggccaggtgcggtggcttatgcctgtaatcccagcactttgggaggccgaggtgggtggatcacgaggtcaggagatcgagaccatcctggctaacacggtgaaaccccgtctctactaaaaataaaaaaaaattatctgggtgtggtggtgggcacctatagtcccaggctgaggcaggagaatggcgtgaacccaggaggcggagcttgcagtgaaccgagatcgcgccactgcactccagcctgggcgacaaagcgagactctgtctcaaaaaaaaaaaaaaaaatttattcttttagagccagggtctcgctctgttgcccagacttcagtgcagtggtgcagtcgtggctcactgcagcttcaacttcctgggttcaactgatcctcccacttcagcctcctgagtagctgggactacaggtgtgcaccaccacgcccagctaatttaaaaaatttgggggtccaggtgtggtggctcacacctgtaatcccagcactttgggaggtcgaggcgagtgggtcacctgaggtcaggagttaaagactagcctggccagtatggcgaaaccctgtctctactaaaaatacaaaaattagctgggcgcagtggcacctgcctgtaatcccagctactctgggggctgaggcaggaggatcgcttgagcgccggaggcagagattgcagtgagctgagaccacgccactgcactccagcctgggcgacagagcaagactctgtctcaaaaaagtaaatttttttttgtagagacagggttccactgtgttgcccagtgagcaactcaaacgcctggcctcaaatgatcctcctgctttggcctcccaaagtgctgggattacagttgtgagccaccatacccggcctttatccaaatttaaaccttgaaggcaaggcagaagaagcacaagtaacacattacatttttcaggattcagcttttgttggctactataggtgatttaggttctgctaaaattaccatttcgagtattagaaatcaaaaaacctagaagggaaaaacgtaaatgacatataataagagactttggggagcatttaaatatggcattgtatatcctgttgcgcattctttgaataagttcactgcattaaagggctccccagcaacctggctccattgatctcttctgaggagggaacaggaaaatggggcctgaaggaggacttttccctgcatatccttgcgccttttaagttttgtaacataagactctttgaccctgctttaaaaaaggaaagttatatagacaaataaataaatgtattactcatatttttatcagttaaataggcagaactgctcgttggtgcattgtcttaaatgcgtcttaagctggtttggttttcgttagactttgagaatgcttttccttgttataattccactgaacgcctatcaaatacagccccttgactgaattctcttgtaaaataaaatctttcttaatccaaagtggaatgaatggcaaataacataaaagttaagctattagttgattatacaccatgtttaatctattgtattccttaatgggtgttttcgttgttcctgtttagcgagaattatatgaaatcatcaccaagacctcatttacttggagtgatttattttggggaaaaccagatgtttgggatggctgataacgcatgaaaagctgcattctttgctgttcgttttctaagggtgtgttaggcaatgatgacaaatattaaggtaccacattactctgtcttactgacatgcccgtgactgatcttttttatcagttagttaaaaacacacacaaagaaagaaaatttaataaaaagctttaaatgtgtgcacagttcaagaagttaatttagatttagattgctaacctatcctttgtgtttaaaaatttttaacaaaaacctcacacactgatactacacacacacacacacacacacacacacacacacacactcctacaatctgttggaaatatttctaaaggaccaccttgggtcaggaaaaaaacatgctttggctgcttggtttgaataagtggtataattgctatttgtctatttttaaaattccaattcttattgaattaggcacacggaccctgatgaagctgcaggaaacagctgaactacttgtgtggctaatttcagaaattcaaagaaaatgcaaacttgagtgtgtcacataacatgtttacggcaacatgcagaagggagatggctttggccattgacttgatttctctccttgtatccagataatcctgcaggtgaaatgtgatgattctccaaaaattgagctgggagagtccaagatccacacccagggcccacaagggccacctgccccttcaactctgccacaactgtgggtccagtcccagcaccgggagatttcccatccaatgaaggaagccttccagtccaccctggggctgcagaccaggcaacccaaggtacagctgagcaatgattcattcgccagccttagacttatttctacccctctggcactgctggccatacctgagtcttcaaattatgttctccacgtgttttgaatgcaggcactgtctcagtgccaagtgcagggtgtactttgccatccaaggataacagtatcatggggagagcttctctcaccttacacggaactcattcagagatagaagcgtccagacttttctgagcaaaaccttatttttgatttccagtgctagaaatagaaaatagtgggcagatcatctgtctccaccaaaggtcagttctcttgcattacgtcttttgatgaaagagtgtaatacattaaaatatgtatctccagctgggcgtggtggctcacgcctgcaatcccagcactttgggaggccaaggcaggcggatcacttgaggtcaggtgttcgagaccagcctggccaacatgatgaaaccccatctttactaaaaatacaaaaaattagccggtgtggtggtgcatgtctgtaatcccagctacttgggaggctgaggcaggagaatcgcttgaaccggggaggtggaggttgcagtgagcggagattgtgccactgcactccagcctgggcgacagggtgggactccatctcaaaaaataaataaaataaaataaaataaaataaaataaaataaaataggtatctcctattttaacgcatgatgtggctgttgcaggtggcattatcggcgggaggaccacacccggtagagcatataatgcctctgtaaggtgagcctcagcatgcacatagggacctcactggggatagtgaagtttctcctttttgtgttttgtaatgtgagtgagggacttcgatgactccaaccacatgactggggagtgaggccccggtgtactccagtgcaagcactgaggctgtgtcaacaagactaaacacagacgaaaactgaaagattcagtaagtcaacactttggggtttgtggagggagggaaaggccattgatgactcagactgaataggtctctcccttgaattaatttattactattatttaaaaatctacaagaatgagagcagctgctaccttgtgtcaggcccggttctgaatgctttacaaacatgaactcaattacatctcatggtaacttttcttatctgcatttgaatgatgagggaatcaagtcatgagagggattataaactggtctatggcccctctttgactcacagatggattttttttttttttgaggtggagtctccctctgtcactcaggctggagtgcagtggcgtgatcttggctcactgcaacctccgcctcccaggttcaagcaattctcctgactcagcctcccaagtacctgggattacaggcgcccacagccacacctggctaatatttgtatttttagtagagacggggcttcaccatgttggccaggctggtctcaaactcttaacctcaggtgatccacctgccttggcctcccaaagtgctgggattacaggtatgagccatagcgcctggccccacagataggttttcacttacaaagagtttagaaggttggtaaaattcatataaaatgaaaacttctggcttttctttaaaaaatggaaaaattgggtggtttggggcctgcatttctgcatggggaccattgtctggatcacgggggcaacagcgagaggctgactggcaagacacacagacacagcccctggagagagaatggccttcgtcgtcaccagagttcctgcctggcccactgcacacatttctgacccatgccagggccccctgagatcactggagttgtgacccttatgtttcaagccatttgagttcattgaagtgggcagatcagtggtggtggtgatggagtctgaagaaattgaggagggaataaaatatttgttgagtgaatgaatgaatgaatgaatgaatgaatgaatgagtgaatatgtccctgggcttgggttgagttttctgggtagcttgaaggatagaaaatacaaggaatgccctaatgtgatgatctgaggcagggactctggagtcaggctgcctggattcaaaccccatcttattagctgctgcatagtgaactctggacttcagagttcccgtctgtaaaatggggaaagtagctgttacaccaggtggctacatgaattaaatgggatataaagtgttaagcacaatgcgtggcacacaataggtgtacaacaaaagttagctatgaaagtcctttaaaaatgcaccttttgggccgggggcggtgctcacacctgtaatcccactactgtgggaggccaaggcaggtggatcacccaaggttaggaattcaagaccatcctggccaacatgttgaaaccccatctctactaaaaatacaaaaataatagctaggcgtggtggcaggcacctgtaagcccagttactcaggaggctgaggcttgaacccaggaggtggaggttgcagtgagctgagatcgcaccgctgcgctctagcttgggctacaagagcaaaatgctgtctcaaaaaaaaaaaatgtaccttttatgaaattgaaataaaggtctgtagtttagttaataataacatacccaggttagtttcttaacagtgacatatgtatccccagtgaggggaaagcgaggaggggtatatgggaacacgctgtactgtctttgcaagttttctgtaaaacccaacttgtttcatgataaaaagtgcaccttggttggacgcggtggctcacgcgtgtaatcccagcactttggaaggccaagatgggcctgaccaacatgatgaaactccgtctctactaaaaatacaaaaagtagccgggcatggtggtgtgcgcctgtagtcccacctactcgggaggctaaagcaggagaattgcttgaacccaggaagtggaggttgcagtgagcccagatcgtgccactgcactccagcctgggtgacagagtaagactctgtctcaaaaaaaaaaaaaaaaaaaaaaaaaaaaaagtgcacctttggctgtaaactatataagtctcgtttcatcaatgcttatgccaaatatttactgaaattaaaatctgcaaatgtactctcaggttttcatgcatcgaggccataaaatctgtttgtgaaataatttcccaaattggtttttaaaatgtgtggctattttgggaaataccgctttctatatcattggctgatccaatgtcatgatgtatacaggcactagtgagccatggtgggtatcagagcagagggtgagcagcaccacaaaagttctaagttgggatgaatatcctggctgaaacaaagaggtagaatgaagtccagaaatcagaacaactggtttgagtctcaattatacggttgccacctatgtgacccagagccagtcactcagattctctgagccttagtccctccatctgtagaatgggcataataatcatacttacttcagagacataagatttaacagatttaaacttaaaaaaaagttacttctgggccaggtacggtggcttacgcctataatcccagcactttgggaggccaaggcgggcagatcatctgagatcgggagttcgagatcagcctgaccaacattgagaaaccctgcctctactaaaaatacaaaattagctggcatggtggtgcatgcctgtaatcccagctactcaggaggctgaggcaggagaatcgcttgaacccgggaggcggaggttttggtgagccaagatcatgccgtggtactccagcctgggcaacaagagtgaaattccatctcaaaaaaaagttacttctaacaggacttaggtttaaattaaaaaaaaaaagactcagcagaagtctggcctattgaaaacactgaataaataatacagttgaggccaggtgcggtggctcacatttgtaattccaacactttgaaaggccaaggcaggtggattgcttgaggtcaggagttcgagaccagcctggccaacatgatgaaaccccgtctctactaaaaatacaaaaatcatccaggcatggcggcaggtgcctgtagtgccagctacttgggaggctggggcaggagaatcacttgaacccggcaggcagaggttgcagtgagccgagattacgccactgaactccagcctggctgatggagcgagactccatctcaaaacaaaacaaaacaaaaatgcaaaataataataataatatagttgagtgcttccatatcccttttttttttctagtccaccatgtctgttattattatccccaaaacacaaattagaaaacacggtataaatagaggccacaatggctttgttaggcttgtgaggcttaagtttcagggcctctttcatagccccagcaggggccttagcaatgtcgtcacatggtgacatgtgtctgtaaaatttgcaaacacaaggtgtttttatagggtttgttttagaggtccctaccccctccaattgtaaagtttcaggttccacaaaatctagatctgtcctgtatggaggagaagtaccagcacaacaaactccacaaaaccaactcttccttctctggactggaattccatggcatccaatgccactgtaatgaacatgggaccactggatttgggagtcgattggctggctccagactccttagctgtatgactctggacaccttcccttacctccctgagccctatggcctcatgaataatatgggaattaatcacgatagcacacaaccaaccctaggagactctccatagatgtatgtttcttaaaaatggaaaatggcctttttcataatgggattccatgtggaaactatgaacatcgcataattcttatgcatctgtctttttgttcttaaacttgtggctgaaatacccatcagtcaggtcatgcctccaaacttgattaccttcagattccaaaggacaatggccttcacatgacaatagccgctatctcttaggaggataatcaaataagagcatctaattcaagaacactggaatgtgagctctatgggtgctgaaacctcaactaggtgattagtgaatatcccaggggttgaaatagaccaagaaaaccagagaccacgaaggccctgctcttttctctgcttaacccaaactacaagatctcccatattcagttctgattggcagttgaatgtaatggtaatgaatgctggttgtggagttgacagagaacttagttcaaatcccagatctaccatttatcatttgtaggactctgggcaaaatgcttaaaatttcttggcctcagccgggcgcggtggctcacgcctgtaatcccagcactttgggaggccgaggtgggcggatcacgaggtcaggagattgagaccatcctggccaggcatggtggcgggcacctgtagtcccaggcctgtagtcccagctactcgggaggctgaagcaggagaatggcgtgaacccaggaggtggagcttgcagtgggctgagatcgcgccaccgcactccagcctaggtgacaaagtgagtctcttgtctcaaaaaaaaaaaaaaaaaaaaaaaaaaaaaatttcttggcctcagtttctttatctgtaaaatgaagataatagtacctaccttatatgagattatacacagacagcttttagcataatgcttactgaacagtaagtgcccaataaatgttagctgtctgtatcaggcagcaataagtggccgctattttcctgtttttttctttcttttttcttttttttgagatgaagtattgctctattgctcaggttggagtgcagtggcacgatctcagctcactgcaacgtctgtttcccaggttcaagtgattctccggccctagcctcccgagtagctgggattagaggcgcactgccaccacacctggctaatttttgtatttttggtagagacaaagttttaccatgttggccaggctggtatctaactcctgatctcaggtgatctgcctgccttggcctcccaaagtactgggattacaggtgtgagccactgcacctggcctattttcctgtttctttttctttcttttcttttcttttctttttttttttttttttttttgaggcagagtcttgttctgtcgcctaggctggagttcagtggtgcaatctcgcctcaatgcaagctccgcctcctgtgttcatgccattctcctgcctcagcctcctgagtagctgggactacaggcacctgccaccacgcccggcaaatgttttgtatttttagtagacacggggtctcgccgtgtcagccaggatggtctcgatctcctgacctcgtgatccacccgcctcagcctcccaaagtgctgggattacaggcatgagccaccgcacccggcttattttcacgtttcttgaatgtttggtagaagtgtaaacctgcttacgtctggtgtgtgtgggcatgtttacgcatgtatgtatgcatgtacacatgtatgcatatatgttagctactaatttaattttctcaacacaggtctatttaggattctggagtctcttggttcagttttggtaaataatgtttctctaggaagttgttaattttgcagtgttcaactttttttggcatgaattttttacagtattaaatttcagttattactctcttctgcatctgcagttatgctctctttttatccctaatatttttatgcatttgttcttttttattagcacttagtagactagtagattattagtctttccaaagaaccagctttggattagctagttttttctgtgaaactgtttgctatataattttaaaaattacctctattaccttcttccttctgctttctttggattactttttttttttttaacctaatagcttgcatttgtaggaattaaaatgtggccaagcaatagtactaagctcacaggcttttctttttttttttttttgagacagagtctcgccctgtcgcccaggcttggagtgcaatggcgtgatcttggctcactgcaacctccacctcccgggttcaagctattctcctgcctcagcctcccgagtagctgggattacaggcgtgcacctccacacccagctaatttttgtatttttagtagagactgggtttcaccatgttggctatgctggtctcaaactcctgacctcgtgatccacccgcctcggcctcccaaagtgctgggattacaggcgtgagccactgtaaaggattgttgtgaaaagtaagattatgcatatgcttgataaatgtgaactgttattattatcttcatgtctcagtttcatcacctctaaaatgggtccatggacggattaaataaggtcatctgggtaaagtacttggctcatacatgttacttgggatcagtattattccccggatgtacaaaatacttgtcattcattataacagtcacgactgtgcccaggggtgagcaaaagcctcagtgtcctcaagggtcccaggatcagccacagaatttgcagggcatggtgcaaatgaaaacatagggcctcttgttaaaaatgttattaagaatttcaagatggccacagcagagcattaagccaagctagaacctgtctgagctcggggccctgtgtaactgcaagggttgcatgtcccagaagttggccctgtcctctctcaaggtcacctgggcagaaagctgttgtttgggtcttgaaggatgagttttgtaaaggccccttgccctgccccttcacacatgtgcattctcattcttctaactaattccaggaccttggaattccatctgacccctaagggctgctcctaatgcaatccgggggaacactagattcagagtcagcccccaaatcaaaggccagcacaaaaccctggataaattacagctgttataaagaagccacctcttcacccttgttctcattttccttgcatttatagtcacaactcaatgaagccatcaacatttgctattcataaacttgttggataagcaaggctgatgggctcacagtgataactagaggcactaaagaaagtgacaagcttcaaattggaggccaagccatacttctaaatgtacagcatattttaaaaaagaatgtgtgatggtttatattgatgtggctcagaataacatatttctataagaaactgttaaatgaatttgcaaaaaggctaagttggcttatgtgctatatgtatgcgtagacaaacatcatggaaatactagagttttctctgttgtaaatgctgctgctgtccaacatgaatcggcaccatgtcctccttgcatcagctggcatccctgtagcattgatcacatacatgccaggtctcctgctggcatctttaaaggactatctcatttagttttctcaacccctgtatggctagtaagctacccaagttcacttaaaaagtgggtgagctaggtttacaacccacctgtctgaccacaaagcctatgttctaagccactatccaaaatagtcacccagggccaggtgcagtggttcacacctgtgataccagcactttgagaggccaaggctgaaagattgcttgagcctaggagttcaagaccagcctggacaacatagtgagatctcatttctaccaaaaaatttaaaaattagctgggtgtggtggtgtgtgcctgtagtctcagctacttgggaggctgaggtgggaggatcacttgagtctgggaggtcaaggctgcagtgagctgtggtcgtgccactgcactccagcctgggcaacagagtgagactttgtctcaaaaaaaaaaaaaaaaaaaattaccctgtcatatcgagtgacaaaaagagatcaagataccagaaaaataatacaaatgtatttaataaaaactgtactaagacctttacatctcctattggtgttgtgaagaaggtctgattatttatttatttttttgagacggagttttgcttttgttgcccaggctggagtgcaatggtgtgatttcggctcatggcaaactctgcctcctggcaaactctgcctcccaggttcaagtgattcttctgtctcagcctctccagtagctgggattacaggtatgtgccaccacgcccggctaattttgtatttttagtagagatggggtttctccatgttggtcaggctagtcttgaactcccgacttcaggtgatccacctgcctttgcctcccaaagtgctgggactacaggcctaagccactgcgcctggctaggtccgattattattatcccgatacggcagatgagcaaactaaggcttggggaggttgaacaacaaaggctgtgcagctagtgatggatttagagacagcctgtagaagcagttagagcttcagaaaacaaacaagagaccttttttttttttttgagatggagtctcactctgtcgcccaggctggagtgcagtggcatgatctcagctcactgcaagctccgcctcctgggttcatgccattctcctgcctcagcctcccaagtagctgggactataggcgcccgccaccacacccggctaattttttgtatttttagttgagacggggtctcaccgtgttagccaggatggtctcgatttcctgaccttgtgatttgcccgcctcggcctccgaaagtgctgggattacaggcgtgagccaccgtgcccggctgagacacttattttctttgaagcaatggagaactgtgtggccaacttttaaattattcgttacttattttttccattcaacatggaacatatttagcctttagtggtccaaatgttgagaggtagaggagcatgtagggctcaaaatcctgaagccacaggaaaagaaaagaaaaatacgtggcttgatgctagtgaggaaagagttaaaaattatcttgcttgtctgacttagacattgctggacgaggccagaaacttttctccccccagaaaatgttataagtaaacactgtatgtaatagatctgtactctctaattgtaagccctggacagcactggaaggttacaggagacacaggcacagacaatatagagggctggaagtgaaagaggtttcttttctcttcttttatcataggtttgtttttatttaaatttggagaatatttaaagcaactgaaaagtacagaataaagtataacaaacacttacagcttcactacttaagattactaaatataaccattgtgttgtagcatcttatatactatttttttaaattttatttatttatctttttgagacggagtctcactctgtcacccaggctgaagtgcaacggcatgatcttggctcaccgcaacctccacctttcgggttcaagcaattctcctgcctcagcctccagagtagctgggattacaggtgcccaccaccatgcccggctaatttttgtatttttagtagagatggggtttcaccatattgaccagggtggtcttgaactcctgaccttgtgatccatctgccttgacctcccaaagtgctgggattacaggtgtgagccaccacgcctggctgatactattttaattaaaaataagacagtactgataaagttgagcccactggacctcaatgcctccccaggagctatggctatcatgaaactgatgtttccttccagcccatgttaatcagtttagtaataaatgtatgtgtccatgtctatgtgtgtatatgtatttacctgtatctttaaatgctataaggtattcttaatttatatacatagtttcttcttttattcatccttttgtttttaagatgtaacatgttggccaggagccactgcgctcagccccatctgctatatttaaaataattatctgcctttaccagatgacagatgaatggatttaaaaaatgtggtatatacatacaataaaatattattcagccttaaaaaagaaggaaataggccgggtgcagtggctcatgcctgtaatcccagaactttgggaggccgaggctggcaaatacctgaggtcaggagtttaagaccagcctggccaacatggtgaaatcctgcctctctaaaaatacaaaaattagccaggcgtgctggtgggtgcttgtaatcccagctactctggaggctgaggcagaagaatcgcttgaacccaagaggtggatgttgcagtgagctgagactgcaccactgcacttcaacctgggcaacagagcaagactctgcctcaaaaaaaacacaaaaaacaaaatacaaaacaaaaaaagatatgacgtgttgacacatatgattcttttcaattgcagtgatgatccttttgggaacagatcacagtctattacccttcccctgcctggtggatatttaggctgttggcaatattttgccattccagccatgccgtgagcttccttatgaccttgggacattcctgagggtgtgttcctaggttctacgtcatggacatgttactttcctcttgatacggtactctccaagctatcacagagaaatttatcctggtcttgcatccctcttaccaactggggactaacaagtatggtcaatccgagctcttcacccagcctgtggatccaaggagatgcaaggtgttggcagcccatccctgccgctcctccctgtctgggtgccctgcagctcctggccaccctttgctcctggcatatgccaagctcttcccagcttccagagcttgctctagttgttcttgggcctctgatgtccttccccagacttctgctgtccatcaggtcgccacatggcccaggtggtgactccacacttgagatgtgactggtgcatgggaggaactggatttttattttttatttttttttgaggcagagtctcgctctctcccccagaatgcagtggcactatcttggctcattgcaacctccgcctcccgggttcaagcgattctcctgcctcagcctccttgagtagctgggattaccggcacatgccaccacgctcggctaatttttgtatttttagtagagatggggtttccccatgttggccaggctggtcttgaactcctgatctcagataatccacctgcctcggcctcccaaagttctgggattacaggcctgaaccaccttgccctgccagaactggatttttcattttacttaatctgcattaaaacttcaaaactgataaattcactcagtagttagaaaacatctaataacttcactcagtaattagaaaacatctaacaacttcactcagttattagaaaacttttaagtatctttagtacaactgggatataggaatctacctttgtgactgtcaactgtatgaaacctgaattcagatcaagtacttctagtgagaatttacagtctagattgaggtgtgttgttggtgtaaaatacacacgattgtgaagacttggtatgaaaagaagaatgtaaaatatttcatttacttttttttttttttgagacggagtctcgctctttcacccaggctggagtgcagtggcgggatctcggctcactgcaagctccgcctctcgggttcacgccattctcctgtctcagcctcccgagtagctgggactacaggcgcccgccaccgaacccggctaattttttgtatttttagtagagatggggtttcaccgtgttagccaggatggtcttgatctcctgacctcgtgatccgcccacctcggcctcccaaagtgctgggattacaggcttgagccaccgcgcctggcctttcatctactttttaaaaaacatttttgaaaatcattttgaaatgacaatattttggaaaaaaatagattaaataaaaataaaagatattattaaaattattttacttggttttttcctttttatttatttatttagagacagggtctcactgcatttcataggctggcctcaaactcctgggctcaacttgtgttctcacatcaatgtcccgagtagctgggactataggtgtgtgccaccatgcctggcttgttgtacctgttttttctgtgttctttttaaaaatcttttaaaactggctatgagaaaatttaacactacatatgagttgaatataataaaatgtattattaaataaacaaataagcaaaattaaaaatttaaaataaataaaaatgatgacaatgcaaataaatatattattaaaatcaaacaaaatgtattaaaattggccaggcacggtggcttatgcctgtaatcccagcactttgggaggctgaggcaggtggatcacctgatgtcaggagtttgagaccatcctggccaacatggtgaaaccctatctactgaaaatacaaaaattagctgggcatggtggtgcatgcctgtaatcccagctacgtgggaggctgaggcaggagaatcgcttgaacctgggaggcagaggttgcagtgagccgagaccatgccattgcatgccagcctgggtgacaagactgaaactctgtctcaaaaaaaagaagaaaaaataaaaaataaaaataaaaataaaatatattaaaattgtttctacccatttcttctttcttcctcctccgtctccccctcctccccctcctcctccttttcctcctcctccttcttcttttcttcttcatattattataagactgggtctcattatgttgcccagggtagattcaaactcctaggctcaagccatcctcctacctcatcctcctgagaaactctgagactacaggctcacaccactgcatacggctcacccatttctttttacccttttaaaatatagctactagaaaatataatagtacatatggatctaaatataataaaataggccaggcacagtggctcatgcctatagtcctagctactcaggaggctgaggcaagaggactgcttgggcccaggagttcgaggtggaaatgagatatgaatgtgccactgcactccagcctgggtgacagaacaagacactgtctcagaaatatatatctagtattattaaataagtaacaaaataaaaatatatataataaattataatagaaataaactaaaaatataaaatatattaaattatttccatacatttccttttactttttaaaatctggctactagaaaattttagcattacagacatggctcacattacttcttttttttttttttttttgagacagagtctcactctgccacccaggctggtacagtacatttggggcaagcgtagctcactgcaacctctatctcctgggctcagcctcctgagtagctgggactacaggtgtgcaccaccacacctggctaatttttgtatttttttgtagagacagggtctcactatgttgcccatgctggtctcaaatccctggattcaagcaatccacctgcctctgcctcccaaaatgttgggattacaggcatgagccaccgcgcccggctgcacgttacatgtctaatgggagcgctagccacatcttcctgagttgttctccttcttctcattcagatctttactttgtcatcacctccccagtggggtctttcctaaccatgcagaatctatgcacttagcccctgtcccactgtcctgtcccattgcttattaccacctgccattttggggttctttgttgttcgtctctccactagaacataagcactttctcaatgaagtgtctgctctcttgttcacgcagcctgctaagtgttagaacagtgtcagcctcctggttttcactcataaatattcgttgcatcaactcatcctgatcatttcttatgaaaattttcaagaattatacaaaacaaactataagtgtacacatacagccaattcaaggtctcaggactatttaacttgaaattcaacattgagagacagcatccttttctactttggattccacagaatttgatctaattatgtttaatttgccacccagcctccctgaaaagtggatgcacaggatgggatggaagaaaagaaagatacagtttggatttatgtaggaagcatgtttgcctgcagcttgataaaagatcatggcctgaaccaaaaaaaaaaaaaaaaaaaaaaatcaatcaatcattcctttcttgatggccattttaaatatttagctgaaattgtcctcatctgggtgtcagctgttttctctgcaaacacccatcacccttgtggtcacacacaatgctgggatggcggggggagccccagctgcaggacacctcttgtgttttcaatttaaagcctctgggttgatagttcacattaacatggaaagaaatatacaacttacgagttgggaaagcagtttttactcataaaaccctttgatagtttagccatctggtcagagtgaaggcccccataaaagagacccaaataaggttaaagggcacagtctctgagggtcaaggaagcctaccagagtttgctctagtggactctgctaaaaggatgcctgacaaattattgtgcattccatagctttttgcgtaagtatttgattacagtggacaggaatgttgttgatattttcaaccttgagttggggaggaggggaggccggacctctgcttttcagacgctcatagtccctgcccgtgtggggagacgtgctctaagcattttatcaaatggtgtttgttctgctctgggctctatctgttcattcgaagtctcttggctttggcaatggtgtgaagagatagtttcctctgtcttgcggagaaaaaaaaacacacaaaaaaccacgttgcatttctctgactcgccaggaaagcccctctgctgtttttcttgctgtttagcaataaaatcggaaaggagaccacaatacttggagctctgtgctatttccggtgtgaatgtcaacagaactcagcatatttatggctttatttctcagaggggatcacagacagaagggaatctgaagtgactaagcgccacgttctttggcggcctggacaaaagcagaggaaatcacttgattttatggagtctttgataacacaagtacagtaagtaaatggcaggtctttgagcagctctagtacacatcttagatttctacaaagttccaagaaggcagctctttcacttgaaattcagaagaatgaagacatgatctgaacacacttcttggcgtggcttcggaagatgttgtttgttatgccttaaggagagggactgtttcattctggtaaaagacaccatacctgtgaaggctttgtagctctttttgcataagactttgttgtaggccaggcatggtggctcacacctgtaatcccagcactttgggacgctgaggcaggcggatcacttgaggtcaggagtttgagaccagcctggccaacatggtgaaaccttgtctctactaaaaatacaaaaacaagcccggtgtggtggtgcacgcctgtaattccagctactcgggaggttgaggcagcagaattgcttgaacccgggaggtggaggttgcagtgagctgagattgtaccactccactccagcctgggtgacagagagagactctgtctcaaaaaaaaaaaaagagagagagagaatatgatattggttgcagtggcagctgtcctgggacaatgaagtaagacatcagtgaagtgctgaggaaggtcatgtggaggataggacgtgcccctgtcctggatgacactgttgaatcttttggagatgcaagatttttgttttctgagacaattaaacgtctttgtccaagccatattgtgttacctttgtgcacaaatgcatcctacatgacatatcacattacagaaaatatcagaggctagtaggttttagaagttataggattgggaaagtagttttttacttttaccaaattaaacaaattaatgcttgagaaaatgctttgcaaaatgcaaacctatagaatctatgcatacactatccattccatcagtcaacaaaaagttattgagccccaaatcagttaggattaggtctggctaggaaagatagaaaacttaaagtaacagtggtttaaacacagagagaagtttatttttcttgcatatctataggcagtacagagccaatatggtgatttcatgattatcaggaactggggctcgttctatctgttctactattctcaacttgtagttttcactgtggttcaatatggaagcatgagctccggagagcacgtcaacatttacctagcagtaaagaggaggggcagcagatagaccccactccttccctaaggctgttattgggaagtcgcctgtgacacatgcatttacatctcatttttcagaacagtcacatgaccatacctagttgtaagggaagctgggaaatgtagtctttattctggacagcaaagaatcctgttaacagtaagggtttctgtttatagggaagaaaagaatggctaactaaggtaaagggcagcctctcccataggttcccaccatgtgccatttatgaaacactgacggcagagcatattaatacgtcagctttgctatggtttggctgtgtccccacccaaatttcatcttgaattcccacgcgttgtgggagggacccggtgggaggtacttgaatcatgggggcaggtctttcccatgctgttcttgtgacagtgagtctcatgagacctgatggtataatgaggggagttttcctgaccaatctctttgcctgccaccatccacgtaagatatgacttgctcctgcttgccgtctgccatgattgtgaggcctccccagccatgtggaagtctaagtcattaaacctctttctttagtaaattgcccagtctcgggtatgtctttattagcagcgtgaaaacggactaacacaagcttatactaggaaaataaagtatgcttctcattatttatatatttattcattcaacaactattgcttgagggctgttcgtacgatctatgagatatgagacatttggtgatagaaaaacaaagcagaagaaatcattatataataagagaaacagcttgattggggagagaagcttatgaccaatcatcacgaatatttttccctaagagaataattgaggatatgcagaaagttttttttttttttttttgagacagagtcttgctctgttgcccgggctggagtgcagtggcacaatctctgctcactgcaacctccacctcctgggttcaagcaattctctgcctcagcctcccgagtagctgagattacaggcatccgccaccaagcctggctaatttttttttgtatttttagtagagatagggtttcaccatcttggctgggctggtcttgaactcctgacctcatgatccacccgcctcagcctccaaaagtgctggaattacaggtgttagccaccgggcccggccacaaaattttacctatataagctcactgcacttttatgtaaaccagcgaaaaatagaaagcaactgaaatagccggctattttaacgattaattgttgcacataattaaaaaacaatctggcaaaatcatagctaaagctaacatatgccagaccatgcatcagctgtttacatgtgttagcttatgtgatccttatgacagtcctacaagatcatgattatttccctttttcttctgagatagagtctcgctctgttgtccgggctgagtgcagtggcacgatcttggctcactgcaacctctgcctcccagattcaagcaattctcctgccttagcctcccgagtatctgagattacaggcacccgccaccacacccagctaattttttgtattttttagtggagatggggttttgccatgttggccaggctggtcttgaactcctgacctcaataacaccaagatcttaacagtcagtggttatctctgggtggtggggtagtggttaatttttttctttccttatatatgtattttataagttttttgcaatgttcacgtactccttttgtaccttacagaaaaaggcaggccgtgggcggtgggtcgcgcctgtaatcccagcactttgggaggctgaggtgggcggatcacctgaggtcaggagttcaagaccagcctgaccaacatggagaaaccccgtctctactaaaaatacaaaattagccaggcatggtggcgtgtgcctgtaatcccagcttctatggaggctgaggcaggagaattgcttgaacctgggaggtggaggttgcagtgagcagagatcgtgccactacattccagcctgggcgacagagtgggactccaactccaaaaaaaaaaaaaagaaaaaggctttataaaactatctggaataatctaaactggagagattgtgcacacagacagtgaggaaatgaaacatggcggtggttcaggaaaacaattccttctacaaaggctggcctggggccaggggtgttttgacagatctggggactgacttgacccaaggatgacacatttgaatgtcctcccatctatggccaaggctttaatgctgcattgagctcacgtgtcaagcttgctccgatgagattgtcactccccaacccttgctccaccccgtggctccatttgtcaccagaaactgacacgtttggataacacgctggcctttgccttttttatttttgtttttttgagacagggtcttgctctgttgcccaagctggagtgcagtggcatgatcacagcttactgcagcctcaacttccttggctcaagtaattctcccatctcagcctcccaagtagctgggactacaggcacatgccactgtgatcagttatttttatttacttatttttttagagatgggggtctcactatgttgcccagcctggtattgaactcctgggctcaagccattctctcgccttggcccctcaaagtgctggggttacaggtgtgagccaccatgcctggcctgatccttgtcattttgcccagcactccttggccctctgcccactctctgctgacacctaacacacagctctgcaaagacctgtctctgggtctgactctctcttgaaggtgagccactggcaggcaggcatggggtctccctagagcaggagctattgcacaatctgttaaaagaacaacctccacctctccttgtcagaaagcaaccattccctcttgccaatccaacttgttctcttcaagaaggcctcaattttcacgttttcccccttgaggatttaaataaataaacatgtcctgcacttgtatcccaaaacttacaataaaataaaattaaaaattaaaaaataaactgcaaactatgggagttaatgctttcaggtgatcctagagggtgtccatccaaaccccaaataaaacctcgatgtgttagttaatactttttccaaaaacaaggttctaggtaggacttttttctctccatcactttctttttaatctagcaaatatacacggaccatttcctgtgttctagaacacataccaagccatgtaatatagtaaaatataagaaaaatgatttttatatttttagtagagatggggtttcaccatgttggccaggctgttctcgaactcctggcctcaagtgacctacctgcctcagcccaatgtgctgggattacaagcctgagccaccatgcgccaggtaaaatgatttaactgccttgtcgatgagtgccaggaaagagaagttctcaacacaacagagcttatttgaagagtcctgacccaggtttgggagaacatagggcgggcagtggaggcttcccagaggaattacttttcattttctggataaaaatattaatattgggccaggcgcggtggctcatgcctgtaatcccagcactttgggaggccaaggcgggcggatcacgaagtcaggagatcgtgaccatcctggctaatacggtgaaacccgtctctactaaaaatacaaaaaaaattagcagggcgtggtggcacgcacctgtagtcccacctactcaggaggctgaggcaggagaattgcttgaacccgggaggcagaggttgcagtgagccgagatggtgccactgcactccagcctgggtgacagagcgagactccatctcaaaaaaaatatatatatatatttatttccagggtgggcatggtggctcatgcctggaatcccagcactttgcgaggctgaggtgggtgaattgtttgagcccaggagctcgagaccagcctgggcaacatggagaaacccgatctctacaaaaaatacaaaaattacccaggtgtggtggcatgtggctgtagtcccagctactcagaggttgaagtgggaggattacttgagcccaggaggttgaggctacagtgagccatgattgcaccactgtgctccagcctggacaacagagtgagaccctatctaaacaaacaaacaaaaaaattatttccatatgtaaatgaatgggaacactgtgctagaagacattgtaaagaagcctgatgaggattccaactgataacagccacgttcggatttagaaaaatgtaagagcaagatcatgtgtggacactattccaatgagaatgtacaggtcagacttgtatcagataagaaaatgcgaaattatcttaattgacattgagaaaacaggccaaggcattattgttatagaaaaaagagtagaacacagctgagcatagtggctcacacctgtaatcccagcactttgggaggctgagggggtccggatcgcttgaggccaggagttcaacaccagcctggctaacatggtgaaaccccgtctctactaaacatacaaaaattagctaggtgtggtcattttcacctgtaatcccagctacctgggaggctgatgcacgagaatcacttgcacccaggaggcagaggctgcggtgagctgagattgcgccactgcactccagcctgggtgacagagcgagactctgtctcaaaaaaaaaaaaaaacaacagcaatcagtgagacagaagtacagccacatattgaaatactatacagctgttttttaaaatatagttggtaacatggccgggcgcggtggctcatgcctgtattcccagcactttgggaggctgaggtgggcagatcacctgaggtcgggagttcgagaccagcctgaccaacatggagaaatcccgtctctactaaaaatacaaaattagccaggcgtgtggcacatgcctgtaatcacagctactagggaggctgatggaggagaatcacttgaacccgggaggtggaggttgcagtgagccgagatcgtgccattgcactccagcctgggcaacaagagtaaaactccatctcagaaaaaaaaaaaaaaaaaaaaaaaaaaaagtagttggtagctttctctacactggtgatacggatcaatctacaagttgaatatgtagtgaaaaaagcgaatgcagatcagtgtgtttagtgaatgtgcttcctctgtaacaataaaaagagagtatggccaggtgccatggctcacgcctgtaatcccagcactttggaagactgaggcgggcggatcatttggggttgggagttcaagaccagcctggctaacatggtgaaactccgtctctactaaaaaaacaaaaaaaaaaacaaaaaaaactttatctgggcgtggtggcacacgcctgtaatctcagctactggagaggctgaggcagaagaatcgcctgaacccaggaggcggaggttgcagtgagccaagatcataccactgcactccagcctgggtgacagagtgaaactccatctcaaaaaaaaaaaaaaaagagtataacattatttgcttgtaaacgtataaacatctccagaaaagtatacaagaaacgaataatggtggctccatctgggtaggaacgggtaggcggaaaatgtttcaaggcacagctctttgtaccttttgagtgttgaatcgtgtgaatagattgcctcttttaaataaataaatcacacacacacacaaaccacaaaaacacaaaaacacatcaaatgaaaattgcaaacactgaaataacataggattatcaaaggtgtcctggcccaatggaattaagaatgactggtttagaatttcactcagactttaaatcatgttagggaattagggcttcctaatggaattcacttagggaatctaatgttttctatgtatgtcccaggatcaattgagggttgctcttagttttcaccgtcataatggtgtataacagacgggttcacaccgtgtttccatagtttccttgcatgctggtattcacaaaaatctgttttgcttctttgggccttttctgtaatttaatttttgttgttgttctgcatgtgtatttagtaattaagggtgggaaaaattcatattatttaaaattaatatgatgataaataggtttctataagaagactcaccaaaaaagtctttaaacgcaactaaaatttaaaataaaaagaaataataagagactcctgtctggctgttgaaactttaaggcatcctttctttcttagaaatagtaagctcccaataagtaaatttaaaaactttaccctccattaaatcctaaaacagtggaagtgaatgatccatcccacagtgtcatatttccggaggggacagtgattatgaatgtctcttggatctgcacgctccattaaactctgttagggagaatactttcaagctccaagagacaattaatttcttacagggagtggcattcttgaacgcacaactgggattctaattacgctcgagcagaaagtaatactttacagggctgggtaaaaacactcattcggaagtaaagttggggggtcataaaaactggggattactttagttagtcatttgtaacaggtaaaagttgtgttttaacttcctggagttgggcgggggaggcagaaggggctattttaggaggaaggagagtccagttaacaaaaggaaggtccttatgaatttttccagggctgcaaattcataaataacaacagtatttattgtaagaaggacagaacttgaggattaacctttccacacatctgtacttaacccattgccccagtaaaagagagcccattgtttgttcagtgtgtcaatcattattatagaaaatgcacacacatctcacccaaaagttggaaagaaaacttggaaaacagtcatcaagcttgaggtaacttgcatggtctagcccagcggttctaagtgggggcgagtctgtcctccaggggacagttggcactgtctggagacattttgggttctcgtaactgggggggcgcgactgaggggtagaggctaaaaatactgctaaacactctacatttagctgggcgtggtggctcacgcttgtaatctcagcactttgggatgccgaggcaggcggatcacctgaggttgggagttcgagaccagcctgaccaacatggagaaaccctctttctactaaaaacacaaaaaattagccggccatgtctgtaatcccagctactcgggaggctgaggcaggagaatcacttgaacctgggagccggaggttgcagtgagccgagattgcgccattgtactccagcctgggcaacaagagcgaaactccgtctcaaaaacaaaacaaaacacacacagacacacacacacacacacacacacacacactctacattctaaacacagaatgcccctacaacaaataattctccacaacatgccagtggtgccaaggttgagaaaccgaggtctagtgctttgctggatgatattggcagggactcttttcttgcaattcaatgtaacataaattcagaccgacaactccttttcaggctggcgcctagcccatgacacataattttttgggggggaattattcagatcccaggaggactccccaataaccacaaaaacaatcatttttctgttctccaagatcatttggagggcaagaaacatatccttggtctccacaataggcaacatacatcccatcatttaagaaatagctttacaaagcatggaaaagaagaagatatttagtccttctttggtagggagggtgtaggggaaatcaacacaagtttaaagaggaagtttggctttgtagtaatctcgctaattggagtacgattctttgaaagtcttggatggagttgaagagggtctgtgaagtctctggaaattaaatgcagaatgtagtttgtacgtgcaaagggctgcagctttcatcagattctcagtaggatctataaccccccaaagatgaaggaccacaagtgcaaagggttccaaatatcagttgtggctacatgcactgattttttttctacatttgaacaggccacacttgcatgtggtgaaaataaaatcagtctgaaagggcagcctgaacagtgattcctcacttaccctgagcgtgctgtttaaggtggcgccaaaaactcagtcatctggataactgttatttccatgcaacattttaaacatgcaaaactaatggaaatgaaaaaagttaatgaaaaaatgatggtgaacaaagtatcaacattttaaataaaggccaggcaaagtggctgaagtcgataatcccaacacttagggaggtcgaggcaggaggatcacttgagcccaggagtttgagaccagcctgggcaacattgcaagaccctgtctccacataaaataaactaataataataaattagctgggcatggtggcatgcatctgtagtctcagatacttgggaggctgaggtgggaggatggcttgaggccaggagttcaaggttgcagtgagctaagatggtgtcactgcacttcagcttgggcaacaaagcgagactctgtctctaaaataaaatgacatacttaaataaaaacaagatcagtcaggtatggtggctcatgccagtaatcccagcaatttgggagggtgacgcaagaggattgcttgagctcaggagttccagacctgcctgggcaactaagcgagaccctgtttctataaaaaatacaagcaaaatagccagatgtggcggtgcacacctgtagtcccaactactcaagaggctgaggtgggaggatcacttgagcccgggaggtcgaggctgcagtgagccaagatcacaccaccacactccagcctgtgttacagagtaagaccctgtctcaaaaccgaaaccaaactccccaaaaccccccaaatcaatattactgtttgtttctttttgcctcaagctccagttaggcttgggaggatggtgttactgacacaggctgttggaagtttcttatgtatttttccagagatattctatgcaaaggtaagcaaatatgtatctatctactacctacatgtatgctttttgttacagtatacacatcattctatatcttgccttcttcatttaatatatctttggaattgttccatataaaaatttatattctatgttatatatttgtgttataaatatacatttcatatattacaattgtgcaagaaaatccacttgtcttcttttttgaagtgtggctataaccaattgctttatatcatcaaacttccttctgcaaagcagagttgtttcctttaaaaatccatttctttttttttgtttgttttgagacagagtctcactctgttgcctaggctggagtgcagtggcgccatctcagctcactgcaaccttggcctcccaggttcaagtgattctcgtgcctcagccacccaagtaacaggaattacaggcatgtgccaccacacccggctaatttttgtatttttttgtagagacgcggtttcatcatgttggccaggtctcgaactcctgaccttaagtgatctgcctgcctagtcctcccaaagagatgggattacagatgtgagccaccatgcctggccttaaaaatccatttctctaatgctggatgctacatttgtttgcaagctcatatcatattttaaaaatctccagggaactatacttaattagttctccattttaaaaaagtgtacacctcctttcctccctccctcgagttggtaaagtggccagaaatggccagactgacttggggagactcctgggtaaactgagtgccttaggagggcacgttggcctcctcgagttactggtcactgctaattagtttagagagtctaaacccttcataatctcaaattccattttcaaagaaaatgaggcttaagttgccacagatgcgaatgatgtcacagagagactttatgagctgccgaaaatcatctgatgctggtaaggcaacatgaacccacgacgtggccctctgctaataacatttagccaacacaagaactgtacagcttctcccttctagagctcaggggcccccagtacatgctgcagaaaatgtgcattttattgtttcagtttgagcttaagataaaagaaagttgccaggcatggtggctcacacctgtaatcccagcactttgggaggctgaagcgggcggatcacttgaggtcaggagttcgagaccatcctggccaacatggtgaaacactgtctctaccaaaaataaaaagatttgactgggcgtagtggctcacacctgtaatcccaacactttgggaggttgaggcgggtggatcacgaggtcaggagtttgagaccagcctggtcaatatggtaaaaccccacctctactaaaaatacaaaaattagctgggcatagtggtacacgcatgtagtcccagctactcaggaggctgaggcaggagaatcgcttgaacccgggaggtggaggttgcagtgagccgggattgtgccactgcactccagcctgggcgacagagagacactgtctcaaaataaaaaaaaaaaaaaagaaatattagccgggcatggtggcgctccagcctgggcaacagggcaagactctgtctcaaaaaaaaaaaaaaaaaaaaaaaagaaagaaatttgaccagtacattgtcacaggggaatttcttgatgccagtaagggccgtggtttaacagagcttcctttatgtatgtaagtaaatgaaaaattcttttattgcttttctgatggacaaatttaccatatacaataatccagaaaatagctatagagggcgaactttgtgcctggtatacttcaaggtctgggatataaagatgaagaaggcaaaacaaacaaatcaagtgtttcaaaatatgttccacagaaaggcaagactatagttcgcacttgccagggataatgacggatttctccaaattttcttttaccttcaatgcagatgctaacatatgattttaaacatgtggggattctcagtgtatatatgcatatacctaaacagatacacagagactcccaagaacacctgtgaggggaatgaggatttcccaaataagtgacataaaatattcttgtttgcttttaatctttacacagagttatccttaaaattgctgaaactttagctgggcatggtggctcatgcctgtaatcccagcactttgggaggcagaggtgggcagatcacccaaggtcaggagttcaagaccagcctgcaccaacatggtgaaacccccatctctgctaaaaatacaaaaaattagccggccatggtggtgggtgcctgtaatcccagctactcgggaggctgaggcaggagaatcgcttaaacccgggaggcggaggttgcagtgagccaagatcgcgccattgcactccagcctgggcaacaagagcaaaacttcatccaaaaaaaatgctgaaactttaaaccatctgctattttttgtttgttttttttagacggagtcttgctctgtcgcccagcctggagtgcagtggcgcaacctcggctcactgcaacctccacctcctgggttcaagcaattcttctgcctcagcctcccgagtatctgggattacagtcacatgccaacacgtctggctaatttttgtatttttagaagagatgggattttgccatgttggccaggctggtcttgaactcctgacctcaagtgatctgcccacctcggcctcccaaagtgctgggattataggcatgaaccactatgcccagccccatctgctatatttaaaagaattttctgcctttatcagatgacagatgaatggattttaaaatgtgatatatacatataatattattcagccataaaaaagaaggaaatactgcaatctgcagcggcagagctgaaaagtttttattttaatttatttatttgtttgagacagtgtcttgctctgtcacccaggctggagtacagtggtgcaatcttggctcactgcaacctctacctcccaggcttgagcaatcctcccacctcagcctcctgagtagctgagacttacaggcacgtgtcaccatgcccagctaattttttgtatttttagtagagacagggtctcaccatattgcccaggctggtctcaaactcccggactcaagcaatcctcccacctcggcctcccaaagtgctaggattacaggtgtgagccaccacacccggccagagatgaaacttgaggacgttatgttaagtgaaataagctaatcacagaaagacaaatactgcatgattctacttatatgagatatccaaaatagtcaaatttgtagaatcaaagtgtggaatagtggttgccgggggctgagagagggggaaatcgtgagttattaatcaatgggtataaagtttccaattgagcaagatgaataatttctagagatctgttgtacattgtacccagagtcaacaatactgtattgtacacttaaaaatgtgctaagaagagcctgccatattggctcaagcctgtaattccagcactttgggaggccgaggtgggcagatcacctgaggttgggagttcaagcctggccaacatggtgaaaccctgtctctcctaaaaaaatacaaaaattagctgggcgtggtggtgcatgcctttaaccccagctactcgagaggctgaggtaggagaatcacttgaatgtgggaggcagaggtggcagtaggctgcgatcatgccactgcgctcagcctgggccacaaagcaaggctccatctcaaaaaaacaaaaaacaaagaacaaaaaaaaaaaaaaaaagaaaactggactgccctttgttagttgctatatttgatgtagcaagtactcctagagaaaagcacgaagcctccacatggctttactcctcactggagggtgactaggctagaaaatgagatgagtattcaaaatattgatcccaaagagttcctatcctttgacgaataagtaagaaaatgcatgtgaaaatggaaaaaaaaaatttaaaaaaatcgcaaacatctttaaagtaatttccaaatcttaattatatatgtacattttttaaaagattgtctcattttattttttgtattgaggtcaaattcacttaacaaaatcaaccatcttaaagtatacaattaagagacacttagtcattcatgatgttgcacagcccccaagctggattatcttcacaaacatgtacattgcacagggctctgggcacgatgggctttgctattttatcgtatagtcatttagtgtccctcaaggacacttggctcctgaagattttcccaaccctaggcctctggctcatactgggtttcctgcctcttctacatcttgtcgttgaatttcaaagctttataacacactaaacaaattgctatgggtcttaattcacagtctctttgatatgtggctggtttatacagcaagtaaatgtctgggtctctgattggttacaaagccaaaaataatccagataatgagaaaattttaattataaccatacttggttttaaaggcccccagattctgtttgtttgcttatttatttgagacagggtttcactttgtcgcccaggctagaatgcagtggtgcaatcatggctcactgcagcgtcgacctctcaggctcaagtgatcctcccacctcagcctcccaatagctgggattccaggtgcacgccaccatgcccagctaatttttggtggagacgaggttttgccatgttgcccaggctggtcttgaattcctgacctcaagtgatgcgcccgcctcaacctcccaaagtgctgggtttacaggaatgagccacctcgccctgaatatttacatacaaactcaaaataatctcctctgccctttgtcaggttgtttgatgggggatagattcaatgcttactgttgaaaatttccagaataaatttgggctctataacatttaatacttataagtgcactgaattatagaagacagttcaaagcttttcctatactgataatttgaactatcatttcttttcaaatgcaaataagttctttgggggtattattagaaaaaaattaaaactccattatttgcatcatagtgtaggaggattactttttaaaataatgactgttttcacccaaacccccgccctgctttagcttccagacaggtagttagagattcacaaaaaaagagaaatcctggctattctttgaagctacaaacaagccctgcatttctgtatgttcttagaaaaagctctggccaggcagtttttttgtgtgtgtgatcacaccagtagcatcactgagttcaaagtggggggaaaacccattttaacaatgcaagaatttcccaaagtccaaacgcccgggccacaccgctcccacaaatggaaatagtatcagatctgcatcataattgatcctccagatttccacccacaaaagaaggatgtggtcagtaagaacaaataacacaggggccgcggagagaagcttttttgcaaactttcccctcactccacccacaaaagtcaggcaaccgacgtacatgtcagcataatcgctcaagatatgatcgcgtttgaggcttatgaaatgttatcaaacgcagtggacaagcacatcggcgatatttcttttttccgctgagatgtgaactgctgataaatatccatggttgagttttttccatactttgattcttcaaaagctaagccattcaaggtgtcaaggctttttgcccctgccttccacagacaacaagggggagaaaaaagaaaaaaagaaaaaagaggatgaaaatgagggggaataagagaaaaaaaaatggacacagataaaagaaattaagcgagccataatgtctgtgctttattttaactgggttgtcctgtcccgctgtgcagcccataatccaagctgggagagaggcccccgctgggtagctaattaaaacaattataaatacaaagaaggtatcaatggcattccaagactcaaacaaagagataaagcactgaagatttaaattgtcaatggccagtctctttaggcaattctgaagaggagtcagtgtccccaagtcccccgaactcctttgtaaactgacttatgtttggttacaggggaccctcctccctcctttttggggggcttatcgacatgaaaattcatcagtgatggaattaagggaagttaatttataggctcacatacagttatttgtcctggcgcgtcagaatagtggacctgagtttaaaattaaaatctaatctggaaaaaagaccccagccctccttattgaatcagtatttttattcgtattttttggcaagaaattagatgcaggtatcagtatttttaaagacaagaaaacaaacaaaaagatcttttagccccaattgaaagtgacacaaaccgttttttttttttttaagtactgtgggcaactttaggaatgttaaaaatgtagcaagtgtgctagactactttctcagtgtatttttataaaatgatttgcagaatcaaacttacccaacaaaaatagaaagctttcctaatttcttagacctaggatttcccctgcctgctttctggcttttgtagagcacttaaaggaacactcaaatcatacatgctaagagatagcagcccagtgcagtttaaagggactctcagcctacagtctgaacgaatagaatggatcgcagaagtttccaggtgggtcccttggagagggtggtcagtttgctctcaagagctgggtgtgatcagcgacagcctgagctccagggcctggccagtgtgctacaggagagagagccaaaggcctcagctcttagaaggctcactcggcctcagctcttagaaggctcactctgaaaaggaggtggtgacagcaactctggtccttcttttcaccatgaaagaaagcgcagtaactggtgtaactggtaaaagccaaaagggagggaggcaattaaggtcgaggagactgataagaactcagtaggggtcagagcccttctcctactccttcacccaccctcctctgctcctttctcagctcctcccactaccactcctttttcttctcccctcttcccctcctccttttccctccttttcttcttcttctaattcctcttccctctttttttttttttcttttttttgagacgaagtcttattctcttgcccaggctggagtgcagtggtgtgatcttggctccttccaacctcagcctcccgggttcaagcgattctcctgactcagcctcccaagtagctgggattacaggcgagtgccaccatgctggggtaatttttgtatttttagtagagacagggtttcaccatgttggccaggccagtctcgaactcctgacctcaagtgatccacccacctcagcctcccatagtactgggattacaggcgtgagccaccatgcccggcctcctcttttaatcttcctcctcctggctgggcatggtggctcacgcctataatcccagcactttgggaggctgaggcaggcggatcacgaggtcaggagttcgagaccagcctggccaacatggtgaaaccccgtctctaggaaaaatacaaaaaattagctgggcatggtggcgcatgcctctaatcccagctacctgggaagctgaggcaggagaatcgcttgaacccaggaggcagaggttgcagtgagtggagatcatgccactgcactccagcctggacgacagtgtgagactccgtctcaaaaataaataaatcttcctcctccaattcttcttcttatcttccttctcctttatcttcttttccttctcttcctccttatacttttttcccttcttcctcttctccttctgcttctccccttcctcctccttcctcctcctctttctcctcttcttccttttttactttgcctctatttgtaaggagattgagactttcttctttaggaatatccatggcttttcactctttgcctttgtgcaagtaattggaagatgtgcttctttcctgggtggaaatattatcaataaaaaagatggaggtctgagactgaatggaaacattggcctgaagcatttgccacaggtgatggtgattaccaaaaagaaaaatgggatttgaccagaatgactttgttttctgggctaaaaactttgcctaataaagcaccttagctgatgtatgtatttatgagttattatgtgtctagagtattaacataaagtacagaggctcctctggttatgaatgttcaattcagaactgatttgaacaaaaagtccacacggaagcaaaagtgtggccgggcgcggtggctcaagcctgtaatcccagaactttgggaggctgaggtgggcggatcacctgaggtcgggagttccagacctgcctgaccaacatggtgaaacctcgtctctactaaaaaaatacaaaaatagccgggcgtggtggcgcatgcctgtaatcccagctactcgggaggctgaggcaggagaatcgcttgaacccaggaggtagaggttgcggtgagccaagatcgcgccattgcactccagcatgggcaacaagaacaaaactctgtcccccaccgcccccaaaaaaagaagcaaaagagtgataattcagcccattgccaacacagggcgatagatactgggatctgacatttacttctcaaagtttctggggtgagacaaggactgaaactcgcttaagaggcagagcaagacagacgggcagatttttcaaccatgtttgtgggccatagcccacatatcatatgctggaatgtgtaaaaataaaaaaatcaatcttaaataaaacattttatcctcctactttgacaagtatacattcataatgacagaagcaaaacatatctgtcaagctatggtttacatatgattaaaagtcagaaaactatcaaagatgagggaatttaattattattgcatatgtctgggtgttgtattgctgggcctctgatattattagtatgagtaacaaacataattaataaattattatatatttattccataacatttcttttttttgtgttgatttcagcaaaatcactaaatgtgtagtgatcaagtttttacataatttatgttctactgacctggatgtggcaatttttttttttttttttttggtaaagagccaggtagtactaggctttgtggtccatacatgcttctttgttttacaaatctttaaaaatattaaaaaaataggccaggcacggtggctcgtgcctgtaatcatagcatttcagaaggctaaggcaggagaatcacttgagcccacgagtttgagaccagcctgggcaacagagcaagacctcgtttctataaaaaataaaaaaattagctgggcgtggtggcacatgcctgtggtcccagctatttgggaggctggggcaggaggaggaggattgcttgagtccaggaggtcgaggctgcagtgagctgtgatcatgccactgcattccatctaggcaacatagcaacaccctgtctcaaaaaaaatttataaaatatttattaaaatacttgtaaaatattgtatatttaatatttataaaatactttatatttatatatttataaaaaattatttaaaatatttatatgttacatatataaatatgtgcaatttgtatatgtaatatataaatattttaaagaaattttaaaatattacatatataaatatatgaatatacaaaaatacctaataaatatatatttgtatactgtatatataccattcttagttcatgggttaaattcagcccttaggctgtcatttgctggcctttgctattgacaataatcatctaaaaggtgaaaaaaatgaaatgcaattatatttatttactttttgagacgatgtctcgctctgtcgcccaggctggagtgcagtggcgcgatctcggttcactgcaagctccaccttccaggttcacgccattctcctgcctcagcctcccgagtaactgggactacaggcgcctgccaccatgcccggctaatgttttgtgtttttagtagagatggggtttcaccgtgttagccaggatggtctcgatctcctgacctcatgatccgcccgcctcggcctcccaaagtctgggattacaggcgtgagccaccgcgcccggcctgaaatgcaattataaagtataaaaaattttaaaaagtaaaccaaaaaactcataaatgtttacaaatatttttcttctaaaatattcaaaatatttaagatgggaaagtaaaatacacgataattgatattaagccttcatatcaaaattaaagaaaatgtaaatatattttttaaagttttggctaaatcccactaaatatttcttataaaaataaaactagcttcaattccggaattcagtgtccatctatagttgccaatgtgaagaatctgtaggcatgttagttacatcaaggccaatgtataagcagattcaagaataatctggggttgggtgcagtggctcacatctgtaatcccagcactttgggaggccgaggcgggtggatcacttgaggtcaggcattcaagaccagcctggaccaacatggccagacgccgtctctgctaaaaatataaaattagctgggcatggcggtgcgcgcctgtaatcccaggtacctcaggaggctgaggcaggagaatcgtttgaaaccagcgggtggaggttgcagtgagccgagattgtgccagtgcactccagggtgggcgacagaatgagactccatctcaaaaaaaattaaaaaaatttaaaaaaagggcaatctgaattatttattctgcaaaatgttcttcagctgccgtttgcaactagtacaaatactgtgctttttgtaagcacctttggaataatgacgggacactgagaagcaagaacgaggatgctcaggtgttgctggggacacttggctctgcaagtatccagctacgggagagaaagatgggagggttaactcagttgtcttttctctttccacggtgttttccctgatcaaatcctccctgcactgtggaacagtgcctttcaatttacagatataggacaaaagatgcagagaacggcttccctggggcctgagcagtgttagtgtcaatggtgggtgtttagtgctatggatggcacaatgccagtgctaagtagcagacactgaggggctgatttacccgtgttttgtttttttgggggggtttgtttgagacagggtctcactctatcatccaggctggagtgcagtggcgcaatctcagctcactgcagccttgacttccctgagcttaggtgatcctcccatctcagcctcccaagtagccgggactacaggcatgtaccaccatgcccggctaatgtttgtatttttagtggagacagggtttccccatgttgcccaggctggtcttgaacatctgggcttgagtgatccttctgccttggcctcccacagttctgagatcacaggcgtgagccaccatgcctggcttacccatgatttttaatgaatattttgtgtgtgtattttatatcgagagccggtaaaacagggcaggggctccttttgcccaagtctaaaggtagactgcaggttggatgacataaacacacagctcaagtgggagatgaaggcagtgctgacacagcaggcaggaccacagaggtgacggatgtggcagaggctgtggtgacctggggagcctgtgctcgtctatagagcactgtcaacattctgcccttaccagtgactgactggtaggaaagtggaccaggccttgttgaaatgtttgatttctcaagagaatgccacagtttaaattttcatgtgaaaagtgaatattgatgaataattaaaatttaaaaaactgaaaagcacatttgggtggggatcacatctctgggctggatttgttcccaaagccaccatgatcagccctctggtctactgcattatgctatatttgtgcatacttttgaagtgtttatggtcaataattccttatttttttttgagatggagccatgctatgttaaccaggctggagtgcagtggcatgatcttggctcagtgcaacctctgcctcctgagttcaagtgattcccctgcctcagcctcccaagatgctgggattacaggtgctcaccaccatgcctgggtaatatttttgtatttctagtagagatgaggttttgccatgttggccaggctggtctcgaactcctgacctcaagtgatctgctcaccttggcctccaaaagtggtgggattacaggcgtgagccactgtgcccggccaaattcctcattttagaaaagaaagtgaaagttaagtgtatagcaatgtgtacacaagggttatatgtgtgctgccactttgacttagcaaaacatggaccaagcaatctcctgtttatatgtaaagaaatggttgggcacggtggctcacacctgtaatcccagcactttgggaggctgaggtgggctaatcacttgggctcaggagttcgagaccagcctggccaacatggtaagacctcttctctacaaaaacataccaaaaaaaaaaaaaaaaatagccgggcatgggtggtgcacacctatattcccagctacttgggaggctgacataggaggatcacctgagcccaagaggttgaggctgcagtgagctgtgactgcaccattgcactccaacctgggtgacagagtgagacccccatttaaaaaaaaaaaaaaaaggcagagaagtttccatacctgaaaatgtcagtctgttatgggctctgcaactaagttaggataatttttcagagatcttcattctactgcaccttattttcagtaagagcagagtagagaaaattttctagtgagattttcccagtctctaatagaagaacaaagttagagatccaaggagagtgtttctagaagatgtgaagcctcaggacatggtttatcctgcagttctggaagggacaacagaagatatctggtatgggagtagcgaaggcaccagaagagaggaaggcagcaagttatgtttccagcattttggagcacaagtgagatgtctggtgtagtggttaagaggtcagactttcccaagttcaaaacccagtttttgcctgggcatggtggctcacacctatgatcccagcactttgggaggccaaggtgggtggatcacttgaggtcaggagttcgagactagtctggccaacatggtgaaaccccatctctactaaaaatacaaaaattacctgggtggggtggtgcgcacctgtaatcccagcttcttgggaggctgaagcacaagaattgcttgaacccaggaggcggaggtggcagtgagccgagatcatgccattgcactccagtctgggctacaaagtgagactctgtctaaaacaaaacaaaaacaacccagtttttgtactcaccagctggaaaaagttgcttttccctctgagctccttcctgcttcatcatttatataaggtggtgatgattacctacctcaaagggctgctgcgggcagtaaatgagtgaatcaaagtcaaagtctagtacccattcctcagtaagtactcaataaatgctgcctattcttcactggagagtgattggaattagcaatgagaatttgtgtagtttatattcaaagccactaaaatgagaagtccagggcaggggcccctcttgcccaagcctaaaggcagactgtgggctagatgagacatctgcagtgaggtacacagttgatatctgaagagagcacctagcagagcctatacatttagaggcatatgtatttgggggaggagaaggaagtggaaccttcaaagggggtcagagaaagaagagtaaggaaggagaaaagccaagggagggataagggaaggttctgtttgaaaataaaaagtagaggccttattttcagaacagtgctgagagtgcaagtgagttagaatggcattttataagcttcaggacatctatgagtcaccttggagaggggagaggtagatatttaaaatgaagattcccagaaagtatgactcagtagttctgggctgaggcccaggaatctacaggaattctaactgggtgtccatgtgtctcacccccactacccatgtacaaaaaaatacaaagtctacaaaagaaaatgggtagctttcaacaggttgctaagggagtaaaggaagggatggtggctggaggtgtttatttttcctgtatgtatataatggtcaaaggcactcaaatatctgtgactttgggtctggatggatgaattaaattggttggttttccaggattaaaccaaccttgcattccaggaataatccaacttgctcatgatggttagtggagaagagatacattgatcagaactcagtctcaggctcaaggcagtttgtctttcctgagctctaggctgacgtgaccttctgtctaaacaacacagtagcttcctaggacttggacataaacatggggtcttctaaagcagtgatcttcaaactatcttcctcatatataccctctaaaataaattttttttttgagattggatctcactatgctgcccaggcaggagtgcagtggctattcagagacaccatcacagtgcactgcagcttcaaactcctgggctcaaaggatccttcctgcctcagcctcccaaatggctgggactacaggcacacaccaccatgcctggcttaaattttttttttttttttgaggtggagtcttgctctgttgcccaggctggaatgcagtggcacaatctcggctcaccgcaacttccacctcccaggttcaagcaattcttctgcctcagcctcccgagtagccaggactacaagtgcatgccaccacgcctggctaatttttgtatttttagtagagatgggattttcaccatattggccaggctggtctcaaactcctgaccttgtgatcctcctgcctcagcatcccaaagtgctgggattacaggcgtgagccattgcgccctgccaataatttttaaaaagatatataattccttccatgttctaaacttgatatctataatgttttcatatctttagatatctttagaggattctggggtattataaatatttgtaaataattcttaaatttgtattcatcgtcatccatttaaactacgcatgaacaagctgtttttctaacagttgaagttttacatcatttttttccccttcatcttgtacttcaactccacttcccctgtgggattttatgtgaacataataatttgggggtctttgaaattgttaattgatcattctatcggacttctcagcaagacaatttatttatttatttattttttgagacagagtctcgctctgttgcccaggctggaatgcagtggcacgatctcagctcactgcaacctccgcctcctgggctcaagcgattctcctgcctcagcctcctgagtagctgggaatacaagcacgtgccaccatgcctggctaattttttatgtgtgtgtttttagtagagacagggtttcaccatgctggccaggctggtctcgaactcctgacctcatgagcaacctgcctctgcctcccaaagtgctgggattacacacgtgagccaccacgcctggctctcagcaagacaatttatagagaaatttaaaaaatttaacttcatttgatcagaattaaactactcttacaattattatttttatgtaattaatgaaaacaatgtgaatgtcccacacaatctgaatgatggaacgttgataactgaagctggttcctggggcagggaggatcattatggttctcactccattgtttatgtttgacatttcccataataaaaagtttaaacacatgtttaaaaaataagtatgtcacaaattctggttaacaatttctaaacaaaagaaatgtaacattttaccggcaataacattttaacaagatgtttaacaagatggatgtgacttgaatggtctctggttttggtgtcaaccaagtaggaaatactgtcatcaggttcttgtgtatctttccagagatattgatgaacatatgaataaacactcattcatacttttttgatctgcaaatggtaacatactgtgtgttccattctgcattttttttctgtctatatagctttagctatggccatgtcatatatctataaagcaagtctgtgtttatgtgtgtgtgtatatatacatagacttgtttatatatataagtgtgtgtgtgtgtgtatttttttttttagagccagggtctttctctgtcatccaggctggagtgcagtggcacaatcatggctcactgtggcctcaatcttctgggctcaagcaatattctcatcttggcctcccaagtagccaggactatagatatgcatcatcatgcccagctagtttttaaattttttgtaatgacaaggtcttgctatgttgtccaggctggtctcaaactcctgagctctagcgatcttccaacctcaccctcccaaaatgctgggattacaggcatgagcaaccacacccagctgctttatattttttaatatacagcttttaatgttttcaatgaattccatggagtgaatttagccaggctcctccctatttagaaacatttaagtggttttcaatcttttgcctttacaatcagtgctatcatgaataaccttcacaaatattattttgctcatctctgagattatcttagaaaaaaatccacaatttttcaagactagttataatataaaaatgcctccttccaatagcttaagaagtatgtttcctaaaattgaaactgacagagtgatcctcttgggtcacctttgtgcgggattcttgtccagcttccacttctctaacttcaaccttagccaactccaatgactgactacaaatctcatcttgttatttcttttctgaatcctgaagcccaactgattgctacttttcctgaaatgacagagaaggaaaaaaccagcaggtattgagaatttaccctgtgcaggcactggaccaggagcatttatatattatctcctggagacttcacagtaacttcatgagcttggtgttttttaaaactaagaaaactgaggggctgggcacagtgactgatgcctgtaacactctgggagggcgaggtaggagaatcacttgaggccaggagtttgagaccagcctgggcaacatagtgagaccccatctctacaaaatataaaaatttagttgggtgtggtgacatgcacctgtagtcctagctactcaggaggctgaggcaggaggattgcttgagaccaggagtgaggttgcagtgagtggtgattgcatcactgcactccagtctatgcagcagagcaagatcctgcctctaaaaaagaaaaaaattaaaaattaaaaataagacagaaaataaagaaaaagaaaactgaggttctgcaaggttaagtcacttgccctaagtcacacagctggtagctggcggggagagggactcagtttcaggtctgagtccagggattcatccagtatctctggactactacaatatacatgcagaccatccaagccaacactgtcttgaatacttttaaagcttttaattttggacatttatttattatttatttatttattattttgagacggagtctccctctgtctcccaggctgcagtgcggtggcgcgatcttggctcactgcaacctctgcctccagtgttcaagtgattcagcctcccgagtagctgggaatacaggtgtgcaccatcacgcctggctaatttttgtatttttagtagagacggggtttcaccatgttggccaggctggtttcgaactcctgacttcaagtgatcctcctgcctcggcctcccaaagtgctgggattacaggcatgagccactgtgcctagccaattttggattactttaaatttatggaaatattgcaaagatagtacagagagttcctgcatatgcttcacccagcttctcctgatgttagcatcttaggtaaccatgatatattcatcgaaactaagaaattaacattgatacaacactatcaactaaactagaggttttatttgtactttgccaattttttcacgaatgtccatttttcttctccgggacccaatccagaataccacgttgcctgtagaatcttgtactattttaaattttttctttcctgtatgtcttagccccccaactacttctggagagcagaaatattacggaacgtttctgttgagtctatcctagagccctagagacagtgctggacccacaacaggaagtcaatcatgatgtgatatgatttatccagcttggtctgatttgtcaaggttctggttgtagaaggaaacagaaagttccatggctctggaatatcaggtgtgctaatgaacagcttgtaaagctgggtgggggacatcagcgccttgtcaccttgtctgccaggcgctggaggaagtgggagatttgttcataacaccgggtcatttcctcccttcctgtcctgacctcccagcttttccctgacagccagtggaagccatggcccaagtcatttagtgacatcttaaggtgaggcaaagaactgacagggagcgctggccctaaactcagacgggaacttccaaatccagatccccctccttagaggggttgccacctggaaacaggagaaatctagacccttaataaaaagaacattttgctgtgtaatttcaccccattcccacaaccatctgctacctactatccataatggagtttttaaaaaatatgcgagtttcattcacttatacattcaacaaacatttactgatacctcctgcatttcagacagatttaggagctaggtataggcagtaaatgaaagagtcctgacccctatcctatcaatagtacaggaaataggcaagtgaactgctaaccaattgtgctaagtgttacactcatttatttatttatttatttatttaatttttaactttttttaaagcgtgatttttgtttttgtttttgttttgagacagagtcttgctctgttacccaggctggagtgcagtggcacgattttggctcaacgcaacatctgcctcctgggttcaactgactgtcatgctgcagtctcccaggtagctggaattacaggcacctgccaccactcccagctaatttttgtatttttagtagagacagggtttcaccatgttggccaggctggtctcaaactgctgacctgaggtgatccacctgcctcggactcccaaagttctgggattacaggcgtgagccactgcgcctggcctgttacactcatttaacacatatttgagcacctctgggtgctaggcacttttctaaatcctggagatgtgatggggaacaaaaaggttttgaagcaaagacagattctaataaaaggggagcctattttattgcgtttttttgtttgtttgttttgtttttgttttttttaaagacagggatttgctctgttggccaggctggagtgcagtggcacaatctcagctcactgcaacctctgcctcccaggctcaggcgatcctcccacctcagcaaagtgctggaattacaactgtgagccaccacaccgaggcaggctattttaaataaaggagtcagggaaggcctccctataaaagtattgtttaatttgggctctaagagatgaaaaaggctgtggctcatccctataatctcggcactttgggaagtggaggtgggtggattgcttgagcccaggagcttgaggctagcctgggcaacatggcaaaaccttgtctctattttaaaaataaaaaattaaagaagaagaagaaaaaacaagacaaagagctagttttggaacaagcgtggaaagaagattccaagcaaatggagcagtgtgtgcaaaggtcctgaggcagaaaagtcttgagcaggttgaagaactgggagagaagaagatagtgacgagtgtgcagtgaacaaagagaggagagggcagcatgataaggctctccttccctgagttctgggttagagattgttgggggaggtatgcctgggaaacctggcagtcagaagagaggctagctggaggcagctgcaggctaacgaggggtgtcagacaacttcctggggaacgtcatgaggattaactgtggttgctgctcagtgagagcttcctaaaggtttgaaggggcttctggcaagcttatgaaaactacccactagggctgggttggtaaattacggtaatctatggcttgagaattctggccctctgcttgtttttatgaataaagttttattggcacacaaccatacccatttgtttgcatattgtctatggctgcttttttgctacaacagcagagtggcccacagagcctaaaatagataccaaactttttacaaaaaagttttgcaggctgggcatggtggctcatgtctgtaattccagcactttgggaggccaaggcaggaagattgcttgagcccaggagttcaagaccagcctgggcaacatagcaagaccccatctctaaaatataataatataataaaaaggtttgccaactccatgcgaggatgtggcaggctaaccctgacacccaacgaaggttttcatgcgaaggaatgatatggtccagataatgttttaagaattttttttgtgactacttggagggtaaattggaagaaggtaagatttgaagtagggaggtaataaagaggcaattattccagtgaaacatgacaattacatgtaccaggagggcagtggtggggatggagagagggagattcagaagatatagtctagagacacccagtaccaatgggtacacctagtgcccacatcatgatttctaaatactattctccaattaaagaaactggggctttgagaaatggctgactccagggctggggtaggaaatatacaagatgaacctggaacatcttgtgatgccaggaagtaagaatgtgcttaaaaaatgatgggacatgttgaaaggacccaggagccaacttggaggacctctgaaagaacaaatctaaaacaatttaagcaaccaaataagcaatgagaataataaactagttaagtccataactgaataaatcaataaataggggagaaagaacagcacttccctacagaagaattctaattaataagtgtgaaaggaatgatagaatttgaaaatcaccatttggcaaacaccagaggaataactcttgcaggcaagaatcatggaggatggtttgtattggggaaaagaatgatgacaaatgggacatttgccatctcgaagaatctccccacaagatacttatcaaagacaaaggggaaaagaactatcactttacactggagaaatcctacagacactaccttcaccaaggtaacatcagcagtaataatgtaacacactgacttcaggtaactcctgatatgatacactaaaaaggccaagtgttgctgggcgcggtggctcatgcctgtaatcccagctctttgggaggcccaggtgggcggatcacgaggtcaggagatcgagaccatcctggctaacacggtgaaacccatctctactaaaaatacaaaaaaaattagccaggtgtggtggcgggcgcctgtagtcccagctactcgggaggctgaggcaggagaatggcgtgaacctaggaggcagagcttgcagtgagccgagatcgcgccactgcaccgcagcctgggtgacagagcgagactctgtctcaaaacaaaaaacaaaaaaaaacaaaaacaaaaacaaaaaaaaggccaagtgtgccatttccaaaaaaaaggcataattgtgatctaatcgtgggaaaacatcagagaatcccaaactgcggaatattctcgaacaactggtcagtactcttcaaaagtatcaaggtcatgaaagatgaaggaagactttgagttcgagattctgaactagatcttgagttagaaaaggaaccttagtggaacaattggcaaaatttgaatatggtctgtagcttcacattgtagcaaggctactttcttgattttgatcactgtactgtgattatataagatgttgccacttggggaagctgggtgaaaggtttttctgggaactctgtactatttttgcaacttttttctacatctaaaattatttcaaagtaaaaagttaaaagctcaaggggggagaaaagatttcagttggagacaccagtaacagaattgctggtcaataggtgtgctggggaggagggagaaggaaaaatatttactgctttgttgcattgtcatcaagcaagataagaagaaatagacacatgtagcaattctgggccagctgtggtggctcatgcctgtaatcccaacactttgagaagccaaggcggaaatgcagaaagactgcttgaggccaggagtttgagaccagcctgggcaacaaggagagacctctcatttctagcaaaagaagaaaaaataaaaaagccctaacacttaagatcaattgtataatctgtgcatttccatctgtttgcatacagtaaaatctgttttatatgttaagcatgaattgtattactgggcatcatctcattcataaatttctggaagggctgcatgtgacggtgaggagaggagaccagctttattaatttatatcttgatttcattatctgaaattagaatattttctgaatatttgagaccaaacattagaattagccagtatttattttgtgtctgtaccagagtctattttgacaggtcaaaaatttttggaggatcaaatacaatgatccattattaactgagcacctattatgtgccaggatttggaccaggtgccaaaaatgcctcatctcacttaatcctcccaacaaccctgtgaccaccacttagctgaggatgctgagcttccaagaaattgatggacctgcttacgatcttaccgtgagggaacagtagcggaggcatttgggagtaacttgcccacgtctctcagccagtgagcagcagagctggtctgagatgtgagtctatacttctaactacagctgcagggcctgttctgtcttccattctctgcaactaaccaagggcaggaccatttagggagtctttacaattttgtcccagtcagtgtgtttgcttgcaagagcaacatggcaagtttgtatattttggggactggatgctcaaatcccatgtttatgttttagctacccctgccaacacgtgatatcaccaactgtaaaacgtctgccagtcttaggatgggaaacaatctcgcttgttcttaagtctatttctccaccaggttaagtccagctctttgtatgtggcactaaccacgtctgtcctctttaaccaatgtctgtccacagcttttgtccacattctccccataggatcaactttttctgattgatttgaaggagttctttgtgcattctgcatgctggatgttaatcatttatttaatacaggtgaaaaatatttttccccgtatcctgcttatctttttactttccttttggtgtcttttttttttctttgagatgggagtctcactctgttgcccaggctggagtgcctgttgcctccaccgtgccaggcgggagaaccccatttctacaagtaatttaaaaaattagccaggtgtggccaggcgcggtggctcatgcctgtaatcccagtactttgggaggctgaggcaggcagatcacgaggtcaggagatcgagaccatcctggctaacacggtgaaacccagtctctactaaaaatacaaaaaattagccgggcgtggtggtgggcgcctgtagtcccagctactggggaggctgaggcaggagaatggcgtgaacccgggaggcggagcttgcagtgagccgagatcgtgccactgcactccaacctgggtgacagagtgagactccgtctcaaagaaaaaaaaaaaattagccaggtgtggtggcatgcacctgtggtcccagctacttgggaggctgaggcgagtatcacctgagcctgggaagttgaagctgcagtgagctgtgattgcaccactgtactccagcctgggcaacagaatgagacctggtctcaaaaaacaaaggaacaaaaagggctgggcatggtggctcacgcctgtaatcccaggcctttgggaggccgagacgggcagattacttgaggtcaggagttcaagactaacctagcaaatatggtgaaaccccatctctactaacattacaaaagttagctgggcatggtggtgtgcacctgtaatcccagccactcaggaggctgaggcagtagaatcacttgaatatgggaagcggaggtcgcagtgagctgagattgtgccaccgcactccagccctgggtgacagagtgagactctgtctcaaaaagaagaaaagaaaaaaggaatacaattatgtgctgatgattacctttcttgcatttctcagttgtcctgcacaagaccaggcacataacatgtgctcaataaatatttctgaacttaaggcaccaacttttctattttctatttaaaaatattatgaacaataccttcttcttgttaactatggcatcattccaggcatttggtggtaagatcacagtactgaaggttttgttcttagtgtcagctttttagctagattgtaaagaatcccattctacagatataaaaacagtaatgttgggtgccaggatttgctatttgaaaaaatgaaattgacaagctacatgtaatctttataccctctaatgcccttattggattattcatatcacactttttcagctattcttaaactaccttgcagcagtactggatcttttcccaaataagtaaacgaggttacagaaaatgagggcacaatgagtagcatttaatagatactgcctgggcctggcatggtggctcacacctgtaatcccagcactttgggaggccgaggtgggcagatcacctgaggtcgggagttcaagactagcctgaccaacatggagaaaccccgtctctactaaaaatacaaaattagtctggtgtggcagcaggtgcctgtaatcccagctacttgggaggctgaggcaggagaatggcttgaacctgggaggcggaggttgcagtgagccaagattgcgccattgcactccagcctgggcaacaagagcgaaactccgtctcaaaaaaagatactactggctgtgcatttctccttccgtcgttttaaatagtcaagttttaagggatctctgggggaggatttcctccagctccctcgcccctccccaaagcggctcccattcattttctgacataaggagctttgtcaatggctgctcgtttccaattttcaggttgccctcagagttactgaaaatccggcaaagctgtccatttattttactgtggcacccaccccattggctttccttgatcactgctttgtccggcgatcaagatttacatttaaatataggaatagaaacagtctttgaggctattagcaatgaaagataatcaattggaaatggttccctgctgggcaattttcaagcagagtcatcaccaaaaaccaattgtgctggcagcttttggccgtcgtgaacatcactgtccaattagaattacagcccttgccgagtcccgtgatttatacacaattgatattgaatattgcttcagcaaacaaggcctatgggataaattcccaacatttggggcacaaaaagattttaaataattcctctttttgctggtgactgcaatggttatgtaggaaaatggtgaaacttcaaatgattttatgcttatagcacttaacgttgtctgattaaggggttggtagattttatatttgtatattgacacctggtcattagaacactcatgatccttgatatttttggtatacttttatttaatatactatatatcacctaaacaatgcaaaaatatgatctcatatggattttcaaaaattctttactaatgccattaagagttattaatgctataacaataatcagcttatctaaattagtacagtacttaataaaataatacgcagtttggaaaaggggacagtcaccatttcagcctttcaccattgctgatgagggtgaaccggtatagtctttttggaaaacaatctggcaacatttagcaaaagccttaaaaatgctctaacctttaacccagtaattcaatttctgggaatctatctgaagaaaataaccctatatatggaaagagctcaaagcattgagatgataaatgcaggattatttttaattacaaaaatgcagagtgaggtggtgcacacagtcctggctatggagaaggctgaggcgggagaatcgcttgagcccaggagttcgaggctgcagtgagctatgattgcaccggagaatacccactgcactccagcctgggctatggagcaagacccatctctttaaaaaaatgagaagaaaaccaaacgtctaccaagagattcatggtcaagtaacatgtttttaagtcatatataataataggaagaaatgccatattagttttcaaagaagggaaaataaaatgctcacgttgtacatacgttaatatacaccatacaatgatgtaaaaacataataggcagagcaaaagactaatagagcaaaatgttagcagtagtggcctatagatttgggactagattatacaggtaattctactttcccgtattattttgtattttccaaaatttctgtataataaatgaatttaatgcatataatgaaaatgagtgactgtcttataatattttcttttgttatgaaaataccaataatacattactgtattgtctcccaatacaatattaatacttcttaagaggagtggtggccaggcatggtggctcatgcctataatcccagcactttgagaggctgaggtgggttgatcatttgagggcaggaggtcaaggccagcctggccaacatggtgaaaccccgtctctaccaaaaacgaaaaacaaaaaacaaaaatgagctgggcatggtgctgcacacttgtaatcccagatacttgggaggctgaagcagaggaggcgcttgaacccgggaggcgtatgttgcagtgagctaagattgtgtcactgccctccagccagggtggcagagtgagactctgtctcaaaaaagaaaaggagtggtaaattttttggtaatattttattaaacaaaagcataagagtgggaggtaaactatagatggaatctgggaatagacccactctatgatggaaatgggtttttttgcagtaacaaggtgagctgctgaaatgactgttgcactaaccgaataaactcctgtttatcctaaaattagaatcctggaggaataacaaagaagcccaggaaggcaatttgttcttccagacacacatctagaaaggagagatgacatgcaattcacaaattgcattataaaaagctctttgcagtttgtcacccaagtactttccagagagtggcagaaaaccaagttaaaaatgtccaggccgggcgcggtggctcacgtctgtaatcccagcactttgggaggctgaggtgggtggatcacgaggtcaggagttcaagaccagcctggccaagatgatgaaaccccatctctactaaaaatacaaaaattagccgggcattgggccgggcgcggtggctcacgcctgtaatcccagcactttgggaagctgaggcgggcggatcacctgaggttgggagttcgagaccagcctgaccaacttggagaacccctgtctctactaaaaatacaaaattagacgggcgtggtggcgggcgcctgtaatcccagctacttgggaggctgaggcaggagaattgctcgaacccaggaggtggaggttgcggtgagccgagattgagccattgcactccagcctgggcaaccggagtgaaactccgtctcaaaaaacaaaacaaaaacccccaaaaaagtggtggattactagtggggaaatctgggcaaaatgtagaagagatatttattattcctcacaactgcatgtgaatctacaatgatctccatgtagactgagattcaaataaaactacttacaaaaatgggtggcaggacagacttagcccctggactgtagtttgctgatccctggataagactattggtgccagtttttacttccctgggacaggattctttgtgatataaatttgcagaggtctcccattgcacacaaagtatatttccccaccctctgatggctggacttgctctaggcgatggaacattagtagacatgatgcaaagaggggctttaccctgttttgtgagtttgcttgccctcttttactcccatgatctgccatgagaaaatcacagtcattgttgacccagggagaatgtagtgatccagggaatagaactgaatccaatctaaaatgtgaagccatgcccagttacccagaagcctagaacagagctgccctgttcaagcatgagccagaaaaataagcacttgctgtaaggccctgggcttttgggggtggtttgttatggggcgttatcttagcaatagctgactaatacaccatccagcattcttggccaacaagcaatagatgttgctttgcacagctggggtgacctctgtcagggtatgtgttttcttcactccactacagtctctgttttccggatgaaggactattgatttgcagcaaatagtcaaaaaaaacaaatgtggaattattttaatagtcaaccatgcccactggatataaaaatgcaagttttggccaggcaccgtggctcacgcctgtaatcccagcactttgggaggctgaggcgggtggatcacctgaggtcaggagttcgagaccagcttggccaaaatggtgaaaccctgtctctacaaaaaatacaaaaattagccaggcatggtggtgggtgcctttaagtccagctacttgggaggctgaggcagaagaatcgcttgaacccaggaggcggaagttgcagtgagcccagatcgctccattgtactccagcctgggcaacaagagtgaaactccatctcaaaaaaaaaaaataaataaaagtaagttttattgctagaggaggaagaggaggaggaaaaaggtcagggagatgtgtgctcttttagtcttggcttacccaagaacaatccttaaatctttaataattttaaagaaaagagcagatcatcagtccatccttagtgcactgaccctcgaacaatgcagggattaggggcaccaatggcacatattttgtgtatgtattgtatactgtattcccacaatagtgcaagctaaggaaaaggaaatgttactgagaaaattaagtgggagtggatcatcatgcaagtcttcattctcgtcatcttcacattgagtaggctgaggacgaggagaaagagaaggggttggtcttgctgtctcaggggtggcagaagaggaagaatatccacatataactggacccacatagttcaaacctgtgttgttggttttttttttttttttgaagacagggtctgtgttgcccaggctagggtgcaatggtcctataataactcactgcagcctccaacccctggcttcaagtgatcctcccacctcaacctcccaagcacctgggactacaggtgtacaccaccatgcccagctcattttttatttttctgtagagctgaggtctcactctgttgcccaggctggtgtcaaactcctgggctcaagtgatcctcctgccttggcctcccaaggggctgagattacaagcatgagccaccatgccagccaaccatgcagctttaatgagatggtcaccggcaatgcattatgacaggcgggaatgtgtctccaaggtgacgggcagtgacccttgcaggagtcttgtattgcacatccttctcaggtgaggcacacgtgttgatggaagcagtgaagaaaaaagagagcagagagatgtcattcacaaggtggcgatgagaagggtcattgctgcttggtgtgtaggaatgaggtagtgtggttagagggaggcatcgcaaagaaatgccctgggagcactacctgctgatgtctgatgactccgcccttcgggagcctcatccgtaatgtgggtcagcatcacttatgttggaaagttgctggatgatgccaaggtgtttgtgaaactcacagcaacacctggcactggtagctactgtaattgttaatttggcagctaacacaaaaacagccacgatgacaaattttaaatcaaaacttttggctggtcatggtggctcacgtctgtaatcccagcaatttggaaggccatggtgggcagctcactggaggtcaggagttcaagaccggcctggccaacatggtgaaaccccctctctaccaaaaatacaaaaattaaccaggcatgatggcatgtgcctgtaatcctagctactctggaggccgaggcacgagaattccttgaacccaggaggtggaggttgcagtgagctaagattgcactactgcactccagcctgggtgatggagtgagactctacctcaagaaaaccccacagacttttacaaatacacaagacactattaatgatgactgctttttgggaggtaaaataagggacagtgaaaagagatgttttcctatacatccccaggtattgcttgacaaaaaaaaaaaatgcacaatattttaaaagacaagatgttttaaggatgtaggagtttttataaatggctttcctggccaggcctggtggctcacacctgtaatcccaccactttgggaggctgaggcggggggatctcttgaggttaggagttcaagaccagcctggccaacgtggtgaaatcctgtctctactaaaaatacaaaaattagccgggcgtggtggcgtgtgcctgtagtcccagctacttgggaggctgaggcaggagaatcacttgaacctgggaggtgaaggttgcagtgagccaagattgtgccactgtactctagcctgggtgacagagatgccatatcaaaaaataaataaatggctttcctatttagaaaagatgtgtttagttttgtagtggaatgaacatttgacatatgtaaatttacttcatatcatttatatatattcttgagaaacactacagtctctaaatatacccacagctagacggcaaaggcctttgtgtctgagcttaatataaaggaatatttgggaacagcatatatcagaaaaaaaatcacattcaaacattgtgttcatgtcaaaaacaatctgagaaataagagcagtttaattctcatgtttattgcagcactattcacaatgcgaaggtaaaatcaacctaagtgtccatcaacagacgagtggataaggaaaatgtggtacatatatagatggaatactatttggccataaaaaagaataaaatcctgtcatttgcagcaacatgggtggagctggaggtcattatgttaagtgaagtaatccaggcacagaaagacaaatatgcatattttcacttctatgtgggaactaaaaaaagttgatctcatggagagtagattgatagataccagaggctgggaagggtgtgtgggtgttggggtagggggtggtgaacagaggttggccaatggatacaaacatacagttagaaggaataagttccaatgtttaatagcagagtagggtgactatagttactacaatgtattgtatatttcatggccttttttctcttttttttttttttttttttgagacggagtttcactctttcacccaggctggagtgcagtgacacaatctcggctcactgcaacctccgcctcccgggttcaagcgattctcctgcctcagcctcccgagtagctgggattacaggcacctgccaccacgcccggctaatttttgtatttttagtagagatggggttttaccacgttggccaggctggtctcgaactcctgacctcgtgattcgcccgccttggacttccaaagtgctgggattacaggcctgagccaccgtgcccagcctgtattgtatatttcaaagcagctaaaagagaggacttaaaatgtccccaacacatagaaatgataaatacttggccaggcgcagtggctcacgcctgtaattccagcactttgggaggccgaggcaggttgatcacctgaggtctggagtttgagaccagcctggctaacacggcaaaaccccatctctactaaaaatacaaaaattagctgggcttggtggcgggcgcctgtaatctcagctactcaggaggctgaggcaggagaattgcttgaactgggaggtgaaggttgcagtgagctgagatcgcgccactgcactccagcctgggcaacagtgaggctgtctcaaaaaaaaaatgaatactcgaggcgatagacaccccaaatacattgactagatcatgacacattctatgcatgtaacaaaatatcatgtgtatcctataatcacaaatattaataaaaaaattttttaaagcaatagtttaaaattcaataccatatctcataagctgctctgaccagctagagcaggagttaggaaattaacgcctatgggtcaactctagccaataacctgcaagttaaattgaaatttttattgagataattgtagattcatgtgcagttgtaagaagtaatacagaaaaagcccttgtatgcttcgcccagtttctccagtggtaatccacctgttttacgtaatctaccaccatgagctaaaagcagtttttgaattttttttctttttggaaaagggtttttctctgttgcccaacctggtgtgcagtggtgcaattatggctctgggctagagactgggctaggattagtaaagaaatgagtatctggaataaaaattattctttcaaagaataaaaattctatgtgacatctgcaccattaattctcttaaacattgatataaaaactgttttcttgcaaccaggaacaaatggataactgaagtacagtcaatatttgttttttctcaaaatccagggttgtctatgtattcattcattctgtcacccaggctatagtacagtggcgtgaccatagatcatagcagcatctgctgggctcaagcgatcctcctgcctcagcctcccgtgtggctgggactacagatgcatgccattgtacctggctaatttttaatgttttttgtagggacggggtctccctatgttgcccaggctggtctcaaactcctggcctcaagcaatcctcacatcttggccttccaaagcactgggattacaggcatgagccaccgctcctggccacgtctatgccttttaaaagaactatacacagagaatcaatttctcttaaagagatagtttatcaaaaggatgcttaaagctaacaagtgcagatgacactgggctgggtactagaattaactgttattcatgtgttgcccctctcagctatgggataaaaatcctgcccttagcattagggtgaaatcagtctttggcgatctttcaagaaatacatactgcacagcatgagaaagagcatgtgagtgcaatgcctttagaattttggaattgacaaatgtacatttgttttctgtaggcctaagtccctcaaactaacacatgaagattgagccatctgaagagcagtttatgggggaaaagactaatagagaggtattacgaagagccctgtttggagaatccttctcaaatacaagggtttttatttttttataaagatgaggtcccactatgctacccaggctggtctcgaactcctgagctcaagggatcctctcaccttggcttcccaaagtgctgggattataggcatgagccactgtacccgggccaaaggttttttttttttttttttttttttaatgtggggggaataagtattcaaatgctggttctacttgttctggttaagacggaagcaatcgcaagtcatttttttttttttttttggagacagagtctcgctctctcacccaggctggagtgcagtggcaggatcttggctcactgcaagctccgcctcccgggttcacgccattctcctgcctcagcctcccgagtacctgggactacaggtggccgccactacaccaggctaattttttgtatttttagtagagacagggtttcatcgtgttagccaggatggtctcgatctcctgacctcgtgatccgcctgcctccgcctcccaaagtgctgggattacaggcatcagccaccgcgccccgccaagtcaaaattttactaagaaaactggaccccagaaactcctttaatatcagacttttttttttttttttgagacagagccttgctctgtcacccaggctggagtgcagtggtgggatctcagctcactgcaacctccaagtccttggttcaagcaattctcgtgcctcagcctcctgagtagcagggattataggcacatgccactatgcctggctaatttttgtatgtctaggagagacagggtttcaccatgttggccaggctggtctcgaactcctggcctcaaatgatctgccctcctcggcctcctaaagtactggggttataggtgtgagtcaccatgcccagccttaacatcagagatctaatgtgaggtgagggggacagtgtatggaattttgcaagtccaggaacttaggtgtgaaaatcttttatttttaaaaattttgtgtagagacagggtctcactctgttgcctaggatggtctcaaactcctggccttccgtgatctgcccaccttggcctcccaaagtacttaggttacaggcacgagccactgcacctggccagaaaatgaatctttagtttcactagcctctgaacgaaatccagtatttctgccaattttggaggtaggcaccaaatcacagtagcattagacaacctgtgctttagtcaacaaaataaattggatattttcgtataacatcatggccattgtagattgctacttcaaaataaaagtagttactagatctgctgatagatcttgtatttagtgttaataaaaacacacttaacaatttaaaaatattttgataactattattttaatggcagtttccttttgcaaacctatgtattttattcttttaaacatcactgagcagattcacagatttcatcgaattgccaaaggggtccatgactcagaatgcactgtgtcttaaagcaggtcctcctaagcaaggggtattgaaaggggatccacctcagagacctaagacgcaggttctaatcctgacaagttgcttgacctcagacaggcttctgtctctcatgccttcacttttatctctattaaaatagaagtgggccaggtgcagtggctcacagctgtaaaaagcacttagggaggccaagtggggaggatagcttgaggccaggagttgagaccagcctgggcaacaaagcaagaacccatctctacaaaaaaaaaaaaaaagcagcatctgaagcagcatgtggggagcaaacgagatgcaattgtgaatgtctcctgacagcagcttctcaagctcaggtggccacttaaactcacataaatccatgtttggttaccaaagataagcatttaagcaacatttataatttcgtaacctgcctatgttgggggaatgcaacattggtcattcctgcaatacttgccctagcacacacgcagcccagggacgtttttccaacctaatgatgctcacatttgaaattttttcccaccctactatagacctcactattcttgcaaagaagactttgttctatctcaacacttagaactcatgattctgttcctgagctgtccacctctgccagtgggagacaccctagactaaggtgagaggttaaggaagctagtggaaggctgggtgtggtggctcacacctctaatcccagcactttgggaggccgaagtgggaggatcacttgaggtcaggagttcaagaccagcctgggcaacatggtgaaaccgtctctactgaaaatacaaaaactagccaggcatggtgacatgtgcctataatcccagctactcgggaggctgaggtgggataattgcttgaacctggggggcagaggctgcagtgagtactgctgcactccagcctgggtgacagagcaagactccacctcaaaaaaaaaaaaaaaaaaaaaaaaaaaaggaagctagtggagaaagactgcaggtgccagagttcagcacagcaggtttgactcccctgtatcagctgcatgatgctgagcaagttaacatctctgaagatcaattttcccttgcaaagatgaaggcaaatgccttccattgtgaggaaccatcaaaataatggaggggatactagtgaatgttagtgggcgccagtgcttgtccctcccatccagagacctggtcccccctatccaggagtcttgatttcaatggtcgaaggcccttcccacagctttccagtgatgcagacaggctgaggtatgcccttttcttcagaaaactggctgttacaatttgcaaagcccgatgcaaaatattttcaaaattgctattaaaaaaattaagaatttaaagtcgatgacagaacatgcaaccaaacagggggcctcctgactatggggccctttgtgacagcacagcctatgaagacggtctgtctccaactcacatggctcttcccaccctggttccacactacaatcacctgcagaactttagaaagtagagatgcccttgtacctcccctgagatatttcaaacaccaaagaggcccccaggggaccgcagcaggcaggcacggtggagagctactggagtagagccttaggatgccttggaagactgtcatggcccaacatccacaagcagcaggcaaaactgtccccataaagcccagataagacaaatacttgcaaatgtaacatctcagggtctttaggacccgtatcacgtgccccatggaaaaagctattaatgcctcccacccctatgaggctgccttactgtgcagacagcagaggatgctcatgagttcagcatctccccttccaggttttcaccggcacagcccactccagaggaacctgcttccccgtgtcctttgtagagctatggtgtgtgactaggtggggaggcaagcagcagcttatgtgcgacttcccagcggtgttaaggacatgaccttctgtcctagttggcgcttaaggtgtcatctgagactatgtgttgaagatgtgtgtggcagggggcatgggaagatagaaatcatgatccctgctgatcataaggccacagtacctagatcttggttattcctcctccccctacaaaagaaaaaaagcaagcagggctcagggggtgggggagacagagggaagccaacttctcttaagtcagtagattgcatcattaggccaaatgcctgacatgacccattttacagaagagtaaaatagactcagatgacatccccctagctgaacgaggcagggatttcccatcttcagctgcattcgcttataactaaaaaaaaggtggcttctcagagtagaaggatggttgccaggagttgggggaaacggggagatgttgatcaaagggcacaatctttgtcatgacatgaacaaattttgggttgtaaggcacagcatgagtggtggcagctgtgttaatctgtggtagtcattacacgatgcttaggtatttccaatcaacacattatagacaccgaatatatacagtctttgtctgttaaatatttaaaagaggcagcttttggccaggcatggtggctcacgcctataatcccagcactttgggaggccgaggcaggtggatcacgaggtcaggagttcgagaccagcctggccaacatagtgaaaccctgtctctactaaaaatacaaaaaattagcaggtcatgatggcaggcgtatgtaattccagctacttgggaggctgaggcaggagaattgcttgaacccaggaggcagaggttgcagtgagctgagatcgcgccattggactccagcctgggcgacaagcgtgaaactccatctcaaggaaacaagagacagcttctaggatgtcaccaccctgccccaatttattactgggtcatattgttttaggaagtttcttccccttatcctttagtttctgcatttaaagagggacaggggctaggtggggtgggagaggccatggcctcaggcacacatttaaggtggtatcccaaatctcagctgatcaaggtaaataccataacgcaactttttaaaaaccaaaatgaatgcaaaagaaacctacaatgaacaggatgtcagaactctaaacacgggatccaactctgcttgcacagccctgacttgccctaatcccaggccaactttccacagaactacaaaaacaaagcagatgacctgtggggccaccgtttgccaatctgcattaaaatattttttggcgactgagttctcggcactcccttaagtctcatgtcccaggcaagtgcctcaccctatcccagctctgggtagcacctgggagaaaaacacctgcagacaggtaaagttcttagtgcagtgcctggctcagtcatgatggcaactcgaattgaggctcatctgctttcttagaagaggttaaatacagggagacaaacaagctatttgtgttctgtagtgtctagaaggcagcaagaaaccttaagcagaggggcgggagatcgccttgatttctgttcttcagtggagattttacaagctgatctgagtaaagatcaaaaggatccagttttccccaatacctaaccggaaactcatctgtctgtggcatggagcaacaccttccttaaagtggccccacgaaatttttctaaagatggagtcgcattgctacccaggctcgacttgaactcttgggctcaaatagttcttcctagctcagtctcccaagtagctgggaccatagacactcattactgatgctggctcaatttcatgttaacatttcccccttgccttttatccaaggccaatcaccctgttgcttgtacttaggggttaacagactggccttccaaatcatgtcctttttataaataaagttttattggcccacagctaaacttatttccttccctattctctgtagctgcattacagtggccgagttggaacctctgtgctacaacagcagtggcaacagagctgataacaagtaggaccagcaaagctcaaaacatttactatctggcccttaactgaaaaagtttgcggatccctggggctcaggtgaagtcaaactgcaaacattctcagtttcctcttccagatccagagggctctgcaaatcaaggctggtgtaagaattgccattctggtctgtgccatgtcagctgctcctttctattaaggctgttttatttggttattacctgtacattttaagtctcattctagcaggtttagccagttcagcccccaattccgaatgatttaaccccatccactgccatcttctaatttcctagaaatggtaaggtaagactacccctactcctacaagtttcctggtcctagacttccctcttagcctacttttctctgaatcttggaattcttaccagtctcaaaaattcttttaagttacccaaattctttttaatactcattcagccttattctcttgaactacactctcagctttgtgcaaatcccatttgtgtctctgccagaaaatttggtatcttttagtgtgttttacaagtcacacttgccagttcagagcaaagtactctgcaggagggcttgctacattctaagaccatgggccaaatctagcctgccacctgtttttgtaaagttttattggaacacagacacacttgttttttcttgcaatctatggttgcttttgcactaaaaccacagagctgagtagttgcaaaaaactttatggccccacccactgcctgaagtaaatattgggttcacagctttttactcacctctgctctattgggaatccaagtttgctgggtgataccagcttggatataaaatccttaaagtccatacagctgttaacaaaaaatgccttctaaaaaggctgatatctttcctctttgtctaaagagctataacaagaagtacaaggaacgtttatgtgatttcaatctatgggttcccacttgaaaggtcaacaaccttctagaacagaaacgcagatcagattcacgacaaacagcagaaaggtaacaatagcaactgtacaatagcaccagcattcagtaaccaaacacttttctgatcaaaacgatcatctccaaagagactaattctatcctgggtctctgtcatcattttaatcttttcttcttacaatagagattcagcagtacaccatcacctacctgatgtaaaacttaaacggagtcagatttgcccaaactaccaccattcacaaaataaactaggtacctctatttcacaagtgaaatagtcccttctacacaacctataaaatcttacatccttttttcttagtttaccaggaacaatggatctacttaatctgtttcaattccagagatgttcagcttgatgagggcacacaagactttatatttaaaaagagtatttgaaggaaagatgccaaaagtagaaaccaagcaactttgggtaagtattatatccactgagatttcataacctcctaagggtccatctatgagaagaggttggattttcagtagtttgtgggttcagcaaacactaaatgctttccgtgatgaaacagatgctggtgtgaggctgtcccacgtatcacatatcccagcacccagcaccaagctcagggcccactgggcccctggacttttctctccaaatagaattaaacagaattttgaattccacaacagacaagcacaggctgggctagttagcttgatctttggcgccacctccagatcaaactgcatttcgttttactacagtaggaactcattgagaaatccaatgtgcgtttataattaagttactgaatggggcgcgggctggggatggagaaccttctaccgtaactgtctgtggagggctgcaaaattgagtgttccttacatcatgctaccatgagtctgccttttttattgtaagacaacaggtaaaagaaaccacacaaacatataaggcaaacactcttagaacgatcacccaggttatgaaatagaagttttccagcaaccccagacccttcacgtacaccttcctcactttaaccctttccactctagagattagttttagttttctatatcgtctaagtttaataattccatcagagatggatcagttttaaaattggaatccgttacgtagaagctatccccattggatagagcagggcttggcagaccccgcctttgaatgaacaagtcgacttgctcagataatccttggagggaagagacaaatgcgaggagtgtctccacagccctgctttgctttgctttcgtcactgtcgcccagccatcgcctctgaaggcctgtgaagttggagcggccagccccagaagtggtgcccaaagcctgtctctcagtggcctcacctctggagggctgggcaacagcactggtcagaagttccgacagctgaccaccctcttcggctgagctagaggtcttggctgggctctaggggagcctcgagctgccccacggagaccagggtgctgagctgtcccgaggcaccgctttccggtgggaaggtgaccaagtctgagttcttgttctcactctgatcactgtgctgcttcttgtggcatctcagagagtcatccctgacgaaggaggcgccgcaggtctcacagcggaaggccctctgcgtcacgatcttggccacgtgctgggagctgccctctctgagcccttccttgcccagaggggcccggttctccgtcttggcctcgtccctgtgcaccttgtcgacgtgcttggccaggctgctgggccgcttcgtgtcgaagctgcagaagtcacacttgaagggacggtccttacagtggactctgctgtgcacgcgcagggcggccgcgctggagcaggagtagctgcactctggacacttctccgggtggtcggcctggtgcagccggctgtgctccaggaggtcagcccggtcccggccctggaaggcacagtgcagacatttgaaggtgtgcttgatgcggatgtgcgatttgagattcgccttcatggtgcagcggacgtcgcagaactcgcacttgaaaggcttctcccccgagtgcacgatcatgtgccttttcaagtccgagctgattttgaacttggcgctacagagccagcactggaagggggtatcccctagcaatggaaggtgtgtttccattagaacaggcaggcaaaacagaccctcccaccccaacctgccttagcacacttggccgccatgagatggttgggttttgtgaactctaaacccaacctcctaatgacaacacttgttgtgcatattaatgcaatcctcacaacaatcctatgagtgggtactattacccccactttacagatgggacaactgaggctcagagaggtcaagttacttggctcaggtcaaacagcagggatttggaacccaggcactatggcactcaagtccatactcttgatgaccccttcagtttcaaatctaaactcccatttaacttgacatcccagaattgaatgtggaagaagaggtgagatttaaattacaaacaactgcttcaaatcaagctaagacctgtgaagacgcttactatagtgtttaatctatatgacatcagttattgagcttgtatttcaagttaaagtttcttacttttataactacaggctaaattttatttataatattaatgcataattatggcagcaggggacaaataataaagagccatggtctttagagtcccattccctggagacattgctaagggtttctagttgtttttgaggttgctgctttaaacgtcagttgaatatacacaaagataagcatcttatcctacacacccatcctttccctaacctctcccctgcattctggtggttgtgacttttacacttttaagctgagtagtagcctcacattttagtccatcagcttctgagattttttgaggattcactcctcttctccacacttaactcctcacttgttagaagtagctttcttttcacctttaagtaaaaaaatatttccattctgtctggtgaattcttatactttaatcattttcagatttcaagttcagaagccaactataaataatttaaatggtgactgggaatgtgatattcatcggagccaaacactgcaccaggattacaatcacttccttataagtctgctgtcacactcaggccagtggatggcgtaaccacccatcaatataattttgttttcttttcttacgtgttgctcatttgggggcacattttaacttgcttcttgattagactgtgtttcttgaaagaaggaatctcaatttcagaagtcatccactctcataattttgtaactttcacaaggaatttttttttttttttttgatacagagtctcactctgtcgcccaggctggagtgcagtgacgcaatctcagctcactgcaagctccgcctcccaggttcatgccattctcctgcctcagcctcccgagtagctgggactacaggtgcccgccaccacgcccagctaatttttttgtatttttagtagagacggggtttcaccgtgttagccaggatggtttcgatctcctgacctcgtgatctgcctgcctcagcctcccaaagtgctgggattacaggcttgagccaccgcgcccggccctttcacaaggaatttttaaaatggatttttaaaacttctgatttagtttctcttgactttctatacaagtatcagcctgatatttctctttgctgcaatcccagttagccatattcaggtattcacatatcaaatatatcatgccagatgtttcctcccttcctttgctagagtttatcttctagtaactcccactagcatggtggctgggagtaaaatcttgagtccttgcacatcattctattttgctctcatacttgagatagtttggctgggtatagaattctaagttcaaaatcatttcccaactcttgagggcactgttccattgtctcctagaagccaatactacccagacatatttctagatatagatgtcccctgtccactcccttccatcctgattggaatcctgtgagcacttttactctcctggccccttagaattgtggacttcatttctcatttgattttctattttcactctattttcttctcacttccattttcttttcttcctagacctggtcagaaaccagacttcaggactggctcttattctcagttcactcacccaatttttttcccgtaatctctgggacattaattttatagctagcaatcctagttttatttcatacttctttgttctcattatctcttcataggtctctatttggatgcaacatttctgccagtgggtagacaccaattagaatgtgaaaattacccaagtactcttacttccaggattagttattgacttggctcattttattccattcatttcctatagatgactcatgatccttggtggactatatttgggaaagtagactggtttaatgattagacatggatgccagaggtttcacctgctactgggttggttgggcagttttgccaggccttggctagtcccccaagctttgtggccctggctgtctacatgcttgttccaagcccagagccctcagggcccttggatattggctggaaactttggcttccaactgtacagctgcctcccatttgtctgctgggacacagctttctatactcagttttaaacatcactatgttcctgtctgctcaccattttccaggaattcattgaaaattttcaacttatgagcatctttatgaatatctcaaaccccatttttccatgccacgatgagttggtcctatcatttcagtagggtcccataaaggaagttcctaagattaaaagtttgtgatttttaattatacttaatggatcctgctacattccaaatttagccatgcaatcagtgtatacatttactgaaacatctagtttataggtctgacttgagatacatcattggcttcttggcagttatagtgggtatctactcccagctggattctatatagtcaagatataaaacccagctgtcagtcatattttaccaaaagttgttgttccggcaacagaaaaatgacaaatctcacaattatcacagaagttccaaattcttgtacttctaccacaccaagtcatttaagttgcttgtgttgttaagtaaatgaaggttaagaaattagagaaaaagtaagggattgaggtttcctggtcagggactcacccgtgtgagatcgcaggtggacggtgagctggctggagttgcggctggcataggggcagagctggcatttgtacggccgctcatcagagtggatccgcaggtgcttcttgaggctactgctgtccacggcagcgtagtcacacaggtgacacttgtgtggcttcacactggtgtggcaccgcatgtgcatggtcaggttgtccttccggctgaagcacttgtcacagaactcacacttgtgcggtttgtctccttcaaacacataaggagtcaaagttaaaggttttttggtcaagatggctacaaagatttgaccaagatgatagcctgggcatatgggtgtgccgcctcctcctgtccaaatactgagagagaaagatactgaagtctacatcagcatattgggaaacaagaatgtgtatcattcattgatagttcagaaatcctaagggaaagatgacataaaaatctgattgatggagaaaattacaggccaaaccctgtttgggaaaaatggcagtggttatagaagtactcaggataagaagtggcagctgtagggatcttgggcagcttcatgaaccacatggagaatggtcaggtggaccccttcctctcacttcttccaaacagcaagcagcacggcatctccccctaggctgttggtcaaagggtgctgaggtcagaaaaagaatacaagggcctggtaagttagagatgccagggacagcagaagaccacatacccagaacacttccatccagccatgtttcatcactaccccctagcccaacccttccaggctgatcatatccaaataaaattagtttacccaataaacaaatgcttggggaaagccagaaccagaaagacacgcccaagtcaagaacttagttactaaagcaaagggaggaaatgaaattagagaaatgaaaactatggaaatcaaaataaaagttctaataagttgaccagcaaaaagggtgtcgaatgacagctattggtggatgtaggtcatcatacatttgtccacaaccgcagaatgtacaacatcaagagtgaaccttggccaggtgcggtggctcacacctgtaattccagtgctttggggggctgaggtgggtggatcgcttgaccccaggagtttgagaccagactgggcaacatggcaaaaccctgtctttacacaaaaaatacaaaatattagctggatgtggtggtgcatgcctgtagttccagctacttgggaggcagaggtgggaagatcacctgagcccaggaggttgaggttgtgagcacagatcgtgccactgcactctagcctgggtgacagagcaagacactgtctcaaaaaaaaaaaaaaaaaaatgaaccttactgtaaactatggtctttggttgagaatgttgtgtcagtgcaggttcatctatggtaaaaatgcactattcaaatgtaatgttggtaatggggaaggctgtgcatgcgcaggagcagggagcatgtgggaaatatctgtatcttcttgtctttaggttcacttttgctgtgaacctaaaactgctcttataaaaacaaaacaaaaagaaaaagccacctattaagaaaaatcttagaaatggaagatacagctaaagaatctcccaaaaggacaagggggaaaagacgccaaaaggtaagacacgaaagctcgttctagatggtccaggatagaactgagaagaattatttcccaacactaaagacagccatgcatcttatttagaagcagggtggtccaatttcagaaccctaagaagggtgagatctggaagcttccagaaagaaaaccaccagcaaaatgctcacatcagcataaagctcctcagaacagtggatgctagcaagacaggaacaggatcttcaactttctagagaaactgttttaatagaatcttatacttgaattagcattcagtgagaggagaagatagttgatatatgacttggtatcacacttaaacactgtacaccagaaaaaaaaataagggtgatggtgaaggtaagatggcaatatgagaaaatactacaatggaaaaagtatagctttcagacaagagaaaaacaaccatcaaaagacttggttggggcgactgggcatggtggctcacacctgtaatcccagcactttggggggccaaggtgggcagatcatgaagtcaggagttcgagaccagcctggccaacatggtgaaatcctgtctctactaaaaatacaaaaattagctgggcttggtgatgcacacctgtaatcccaactactggggaggctgaggcaggagaatggcttgaacccaggaggaggaggttgcagtgagccgagatcgtgccactgcactccaacctgggtgacagagcaagatttttttttttttttttttgagacagacttggttgggcacaatggctcacatctgtaatcccaacacttttgagaggatcacttaagtccagaagttctagaccagcctgggcaacacagtgagaccctgactctaccaaaaaaaaaaaaaaaaaaaaaaaaaggatttgctacgtgtggtggtatacccttgtagtcccagctacttgggaggctcaggtgggaggatcacatgagcccagaaggtgagctctgatcataccactgcactctagcctaggtggcagaacaagaacttgtctctatgaaacgaaaaaaccaaacagcacaaaataaaaatcacatcaaatatcagataactagatgtcaaagtaaatattataaacaaaaacgtattacatttccctcttaaagatttaaattataggtcaggtgctgtggctcacgccagtaatcccagcacactgggaggccaaggcaggaggattgcttgaggccggaaggttgagaccagcctgggcaacacagggagagctcatctctactttaataaaagttaaaaatatatttaagttaaattaagaaaaaaagccactaaatgctctgaagatacctaaatcaaagtgataggaacacaatagaaattctagaaaaatgcttaaaaaaagtaggaatatcaattttagcatcaggcaaaatagaaatcatggtgaaatccattaaaaatttcatatggatgagagagttcagtatgtagataaaagtcaaacttttatgagtgtaacatggcttcacaaatggtttttcaaaaatgtcatcttggaagttttagaatgtcttttaggacagtttttgtcaaaattagattacaaactccagaaacagataagtttcctatttcaaaacctatggccgtggctgggcgcggtggctcacgtctgtaatcccagcactttgggaagccaaggcaggcagatcacctgagcttgggagttcgagaccaacctgaccaacatggagaaaccccgtctctactaaaaatacaaaaaaattagctagacgtggtggcacatgcctgtaatcccagctacttgggaagctgaggcaggagaatcgcttgaacccaggaggtggaggttgcggtgagccaagattgcaccattgcattccagcctgggcaacaagagcgaaactccgtctcaaaacaaaaccaaacaaaaaacctatagtctataatggctttaaagtagtttgtagatttaagttcacttctaacaaaatgctgaaatcaagtgcacagtatgcaattcaagaaaccaaaagaaagaattgaggctacgtatagcacttgatcaataaaagtaaaaatggtgcttaagaaggaaggcttagctcaaaaagagaggataccaacagatcagggttcttaatctcaacactattagaaattctctgctgtttggtgctttcctctgcattgtaagatgtttatcggcatccctggcctccacccaccagatgccagtagaaccctttcttctccagttgtaacaatcgaagatgtctccagacattgttcccttggggggtgaaatcatacctagttgaaaaccattccaatagactttggaaaagcagaaggggactacagatacacaaagtcaatcgtgactattaagtagaactttataccccaataaatttagaagactcaataagatgggtgatggtccaggaagatgtaaaactgcgaagtctggattaaaagatcgaaaacaggccgggtgcagtggctcacacctgcaatcccaacactttgggaggccaaggcaggcggatccgccttgacttgaggtcaggagtttgagacctgcctggccaaggtgaaacagcatctccactgtaaaaatacaaaaattagccaggcatggtggtgcacagctataatcccagctactcaggaggctgaggcacgagaatcacttgaaccagggagacataagttgcagtaagccaagagtgcaccactgtactccagcctgggtaagaggaagactgtctctcaaaaacaaaacaaaaaaactgaaacaaaacagatcgataacaatgacaaattatgctaaagatctactctctaaggtaaattgtttattgttcgcaagtatttgctgtaacttatggggagaattatgcttccctgtcccaatagcctctggtttggacatgacgtactccggctaatgaaatatgacagaaagtgacaagaattgttgtcaagggccactgtgtggttcctcacacttgtttctcttgctcaagatacactgttccaaatcaggagattaaaaaaaaaatttttttttttttaatagacagagcctcactctgtccccaaggctggagtgcagtggcacgattttggttcactgcaacctgtgcctcccaggttcaagcgattctcctgcctcagcctcctaagtagctgggattacaggcagccaccaccacgcgtggctaatatttgtatttttagtagagatgggtttcaccatgttggccaggctggtcttgaactcctgacctcaggtgatctgcctgcctcagcctctgaaagtgctgggattacaggcgtgagccactgcgcccagccatcaggagatttttatctggggtctgtgtataaaatttcaggggtctaagatcttatatgggaaatgattgcatttttatcttccctaccttaactactgtttagcattgccttcaattatggatgtaggcaataaaccacactagtaacagtgctggagaccctcgtcaatggacatgaaatgtggtcgtaccacattacactcattgtagttctccaagttatcacttatgctcacttttgcaattagggtagttaatatgctagccactagctcctgacattaaatgcagggcttctctgggactactgtgcatattaaccacccgggcttgggagcatctcattaagatgcagattctgattcagtaggtctacggtgcagcttgggttcctgcattttgatctaccaagctcccagctgatgtggacacttctggtctttgtaccagtttgggtagcaagggcttaaagtatgaaaattgcacatttaacattgatgattatatcacaatatgatttttttaaatgtgatatatcttattagatttaaagacatctttttgagaagagtccatccaaattgccaggagtgcatagcacaacaaaggtcaagaacgccttcatctggctgttccggacagaggcagatctaccaactgggtcccggagagaagaccacaaggaatgcagctggggtgactgtgggggatagtggcatatatggagcagtcttcagttgtcactgaggttgacagtgctatctcagcctaatccatcctccttctatgctcctaaggattggagcagagaggggattgtgtgcacgttctaccaaactttcaaggaaagtcgtttctgtagtcaactgtttcagagcatagagaaagattttgcttcagttcactttataacagctacctgataccaatgccaaatgaagaaatacaaagtgggataaaaatacaaacataaatcagtctcctttacgaagctaaataaatgccacaggaccatcttaaactagcaatatagggctgggggggaagggtggctcacgcctgtaatcccagcactttggaaggccgaggcaggaagatcacttgaggccaggagtttgagactagccttgacaatagtgagacctcgtcactacaaaataaaataaaattagctgggcgaaatggggcatgcctgcagccccagctattcaagaagcagaggcatgaggatcacttgaacctgattgcactactgcattccagcctgggtgacagagcaagagaagaccctgtctcaaaataaataaataaataaataaataataaaaaggaaaatgcaatacatttgaaatacaaccactattcccagttaaacacacacctcagtattcctagctttctgagcttggttttaacttgaaagtgataagtgatctcaaccaaaatcccaggggttctaaccctacaatgatggtgaccttgaggcatgcccaaagcatgcccatgacggggaataagacagatggtttgagttgactgctactcttcaatttgaactgaagcaccaaagccaaggcacacaaggtcaaatacgaagtcagaaagagaaagcttatttgcatatgttaatttacttaagcaatccaaaagaaccacaggttagaatccctgcctcccacttacaactgggtcagagacacacgctgacctttcccctctcctcttggtaacagaaccttctttgcagctgggcacacaaccgcacaggagaaacttccttttcccagccttcatttccacagctgggggtggccatgggattcagttctggccaaacagatgagctcgagtggtgtggctttaaggtggcaggaggccattgtggagcaggctaatgagagctgcacccttgggatgacaacgcaaagcaacagcctgggtccctgagaccaccgggccagtgccacaccagcctgatcactcacacctggaacatcatggtgcagaaatactttggctttaaaccaccattacttgagtcccagtagtgacaaaggatgctacttctgggtcgtgccccaagggaggaataccatgaggcctccatgccttttctcctactttccattagttaaattcagagaactaaagcagtcacctggggcccagagaagtggcctaagtttgcttacactagggaggcgcgtctgcttacctgactcaagaacaaggccttatcttttatgtcctggatccccagcatgctctgcggtacctcaagaaaacagtaatccagcccctgtacatctcttggggtcgaacccagcactgtggatgttccaggcctttcattcttgtgaaggttgtgttgtgaattttaagatttttggcctccacccactgaatggcagtagcctagccccagttgagaacaagcactcaagttattttcaggataaagtcacccactctgagattcctcaaactgagctgcctcgtctttcctcaaagggctcctgaatctgcatgctttcactgacatcgtcatcctggtagcctgtcttccaaggtgaagatcaaacatttccttgctaacatgcttgtcatgatccactgtccccaggcaaaagtggccctctattatagcacagtgcccatctttctggacagagaccaccatctttgtccagaaatctctgtcctctcagtgaaggggctccagaggctcatctggccatgtgttgccccgcttaaaaccatccctcaggcccccttggtactcggtgtggccatgactaagtcccgctcatgttcccctaggtcacaagggccgctgcttctgggtcacagcccaagggaggcatgccatgggctccctggcctgcttccattgcctgctggctaagcgatgcagagaactacagcagctgcctcagacccagaggctaagccaagtgttcaggatggcagagccattggaccagctgtggactctatgcctctgaagatgtactcaagaaataaactggattacgtttaagccactgagactggtttctgaaagaacaaaccaatattctcgctcaaacatgcaagtataggatttgtaccacagattaagggttggcaaagtgttttgtaaagggctaagtagtattttaggcaggatgggcatggtggctcatgcctgtaattccagcactttagggggccaaggcaggtggatcacctgaggtcaggagttcgagaccagcctggccaacatggcaaaaccccgtctctactaaaaatagaaaaattagctgggcaaggtggcaggcgcctgtaatcctagctattcaggaggctggggcaggagaatcacttgaacctgggaggcaggggtcgcaatgaactgagattgcaccactgcattctagcctgggtgacagagcaggactctgtctcagagaaaaaaacaaaacaaaaagatagtattttaggctttgtgcaccctacagtccctgtaacaactacctcttgtaaggccagaaagctgcaagcaataggtaaatgaaggagcatgccaacaggctgagttgcccatgggctgcagtttgtaatcctggcatagattatggcactcctttgcttcagcaggtcttatttctcttctcagcagctggctgccctaaaaaaaaaagcacctttaagaagccaccttattgctctaagatgactatagccacaggctctgtgtagctcatcctgggaatcacttcatcttcatgtcacagcccttttgctccttctcccaagcccaccccactagactgagtttcatgaggcagatgaggcagagactgtcctgttcattactgtgtccctagcgcttaattcacattcacgtcccatctttcttactgagctgttgaacagaatggatacctacccgtgtggattctgagatggcggtccaagtctttcatgccatggacagttttgaagtggcaacctagaaaagaaaaatagattttttttttttttttttggagacagagttttgctctgtcgcccaggctggagtgcagtggctccatctcggctcactgcaacctccgcctcccgggttcaagagattaccctgtttcagcctcctgagtagctgggattacaggcgcctgccaccacgcctggctaatttttgtatttttgatagagatggggtttcaccatgttggccaggctggtctggtctcaaactcctgaactcaggtgatctgcccgccccggcttcccaaagtgctgggattacaggtgtgagccaccatgcctggcctgaagaatacaattcttagaagaacctcagttgagtgtggtggcccacacctgccatccccgagcttgggagaccaaggtgggaggatcactggaggccagaagtttgagaccagcctgggtaacgtagagacccccgccccctatttaaaaaaaaaaattagccagacatggtggtgcatgcctgtagtcccaactactcagggggcggatgagggaagatcacatgcacccagtgagttggaggctgcagtgagttatgatcacaccactatactccagccttaacagagcaagaccttgtcttgggatgctgaggcaggagaattgctagaacctgagaggcggaggttgcagtgagccgagatcacaccattgcactccagcctgggcaacaagagtgaaactgtctccaaaaaaaaaaaaaaaaagagtccatatatgtataacctcagggtggaagctactatgaatccaatgttctggtgagtcccacgctgagctctggatgctacaggcctcttaggccccccagggaaggctgttgtgtgctgatgtagatactggcatgttgtcagcaaacaagagtaacatgagcaggcagctcagagattcacgtagggcttgcagatcagtgcttggctcagaagcggctcagcacgcagggttttactcttacctgggtagcaacagttgaacgtcctctctccaagggtggccatttgttcccttgcctctgagggaagagtgatgacaggggccttcggagtgtcagtgctttcagtggagaggcagtttgcttttggaacatcatcatcaagttctgaagctgaaattgaggcatagttttgcttagtttctcatttataaccaccatgctaagtcttagaatacagtaggtttgggcttatttcacctcccttcacctttccagaaaaaatttaaaaaaaatgaaagccatgtgaccaggcggggtggctcatgcctgtaatcccagcactttgggaggctgaggttggtggagcacgagttcaggagttcgagaccagcctggccaatatggtgaaaccctgtctctactaaaaatacaagaatcagccaggcatggtggtatgtgcctgtagtcccagctactcgggaggctgaggcaggagaatcgctggaacctgggaggcagaggttgcagtgagccgagatcatgccactgcactccagcctgggcaacagagcaagactctgtctttaccaaaaaaaaaaaaaaaaagcaagccatgtatgctctgtcttgcaaaagtcctcttccccttactacggtttccaagaagtacaggggacaggacactgtcacataacagggaaactggcaaaatctaaactaaaaaacatatgagtacttcttaaatggcatgaagacctagttttttctaacaatttctaatccatcccaggctgatatttctgtaaaatatgataaacaagaattaggggagaggtggaataagataaaaagagcccaatcattagatacagcaaaaagctggatgccatggcaatgtcaaacttttttttttttttttaagatgcttactctggatttctgatttgttttgcctcagttcagcaaaaggtcacagaccacacatcactgatctccaggataaaacagttgtttcaacaaataacttgaaagaagaaagatggaagaggagaaaaagcaaagactgagagacttgaggtggtcgacaatatcgggactttacttggctcctgattagaatatgctggaaaagctgagatggtaagaagtgtgctcactcactgcaagtttgctacaggggttttatactttggtgtgaaaatggaattagagtttaaagagcattccccatagtctaaggatgaatgttgaaacatttacaagttgtatgatatgtgaatttgtcttcaaaaataatccagggcagggagagagctggcataaggagaaatgagattgaccacatgcaattaatggttgaagtggatcaatggatgagaattcactatagtctatttttaggaaggttgaactaggtgaaatcgctatttttgttagccaaaacggtcaaataatttcatgtttcaatctaatatgtaggttttaagattcctacagcaaagattaagtactagaagattctgaaatatctcaaaatagacttaaatctaaaaggaaaaaaggtcccatcaaggtctgaagttttttctttttttgagacggagtctcgctctgtcacccaggctggattgcagtggtgtgatcttggctcactgcaaattccgcctcccgggttcacgccattctcctgcttcagtctcccaacggggactacaggcacccaccaccatgcccggctaattttttgtattttcagtagagatggggttccactgtgttagccaggatggtctcgatctcctgaccttgtgatccacccacctcggcctcccaaagtttttttttttgaaacagagtctcactctgtcgcccagactggagtgcagtggtaccatctcagctcactgcaacctctgcctcctgggttcaagcgattctcctgcctcagactcccaggtagctgggattacagacgtgcgccaccacgcctgcctaatttttgtatttttagtagagacagggtttcaccatgttggccaagttggtcttgaactcctgacctcaagtgatccgcccatctcagcctcccaaagtgctgggactatagccacgagccactgtgtacagccatctaaagtcttagaagattgactagcttatgaattataggccaaggtctgggactttctctgtcctaaggttattacaaaaggtggattatcacttttattgagaagtttgtgcgggtgaaggaatcttagcatgagaggctgtagagcacagtggtgagggcttcagttttaggcagagggtttgctcagctatgtgctgtgcaactattggcaagctacttaacctttctgagcttcagtttactcgtttgcaaaaggagattacatgcctcagagttgcagagttaaacaagatgaaaaaatatataagttctcagtacagtgtcatctgagtaaatacaattgcgtggcttcagatgtcgcaagtgaggactacagatttcacatcctagcagttgtgctcgaagccccttaacaagtgatctagtccagtggctctcaactgggggccattctaccaccaaaggacactcagcaatgcctgggaacattttcaattgtcatgattctgtttgcatgcatgtttgagaatggcatctagtgggtgaaggccagggatgctgctagacatcctatagggcataggacagcccccacaaggaaacgatgcagccccaaaggtcaatagggctggggttgagaaagtctgcagtagtcctactcccaatgtttcttccaagtgtaatcctgatactatctgtgtcacaatcacctagatcatgggttcagtgtagtttcccaggccttaccctatactcactgaaaacttaggggcaggaggaggggtggtagtgtggatcaagtaaggacttgcgattccagggacttgcgatttttttttgagacaaggtctcgctgtcacccaggctggagtgcagtggcaccaacatggctcactgcaaactccgccttccaggctcaagccatcctcctacctcagcctcccgaatagctgggaccacaggcatgcaccaccacatgcctagtttttgtatttttgtatttttttgtagttttgtattttttgtagttttgtttttatagagacagggttttgccatgttgcccatgctggtctcaaactcctgagctcgagcaatctgcccaccttaaccactcaaaagtgctgggattacaggcatgagccaccacacctgacctcagggccttgcatttttgaagcacttgccagatgattctgctgtattacttgtaagtccttgctactcaaagggtggtccctagagcaccagcatcacctgagagcttgttaaaaatgcagagtctcagccgggtgccgtggctcatgcctgtaatcctagcattttgggaggctgaggcaggcgtcccatcctggctaacacagtgaaacctgtctctactaaaaataccaaaaaaaaaaaaaaaaaaaaaattagccaggtgtggtggcatgtgcctgtaatcccagctactcaggagactgaggcaggagaatcgcttgaacctgtggggcagaggttgcagtgagcccagatcgtgccactgcactccagcctggtgagagtaactccatctccaaaaaaaaaaaaaaaaaaggcagcagtctcaggccctactccagacttacagaaccaatctgtactttagccagatccccaggtgattcctgagcacagcacattacaatttgagaagcacagctcacagccagtggttctcagacgtcagcgtgtatcagaattgcctagaaggctacttaaaacacaggtggcaggggctcccatttggagttcctgattgagtaggtatggggtggagcctgcgatttttcacttctaacaagttcccagttgatgccgatgctggtctgggaaccatacttttgagtctcttgctctgtgagcaagaaactggctcagatgctcaaggttgcaggactggaagttttcagctcattggaacccacacttgccagatctgcaacccatcctatgtccctcagggacagacacaaacaaagcctcattacatagcaactcacatactagaagagaaaaccattaaactcttgagggttttaattccacagaagtcaagcaagactgaaaacaaatctaagtgaggcactgtataacacagtggtttggggaacagactgggaaaccagctgataagtttcaattccagttttaccattagctgtgtcccactggataagctactcaacttccccgttcctcagtttccacatctgtgaaatgggtattatggccgtctcattagcttagatgaagttctttagtatatgtaagagaacctcatgtattagtcaatactgtataaatgctattagtgttattcactgatatacacacgtaagattctaccagattctcagggggagaaagatgcatgttttcaacgcaaactagaaaagtgagagagaggtgggttaaaggatgacccagatagagcctctgatggggaggtgtgaggggcctccgatttcttttacgtttagacacccaggaaaccaaagaaggcctgaagcccactctcctgggaaaggtgcagctgggggagaccctctgcctctggaagtgggggtgggccgcatttgactattagaaaccaggttagcatggcgagggttttaactcctggggaaacggatgatgttccctcagtaaggttcctccagccccttcgtcattttactggtggtgacaggaagtccactaattactttccattttattttcctccaaaagctacttgagttgcaaagacacttgcaaattaagagtggcccaaccttcgtaaaaaatgtacccccttgccagtgtcgcagaccaaaggtactaggataaaacgtcagttggaagacggttttttctccgaagtggtggctggggttgaggcacactactgggccggcagagtttgcgtcctgctcccacagaagtcacctcagtactccaggacgcacgacaccctccccatgcccgaaacactgggtgcggctccagaaggcgcctcgcagcgctggctgcaggaatccaaagtagctcagtgcacagactttcaactccagcctggggttactcagcaattctcttctataaacacctcccccaaaagactcagcatccccagtacctccccaacttccccgaggcgcagagatcagcaagagccccgcccctcgacccaggggacgggatcctgtaagtctcacctgcctatctccatcccaggcctcgggcacgagggtggttgtactatcctggttatggtagctccactcgagcaagctttattttaacatataagctattcgtttagtggaggcttcattaaactactcccctccaccaccacctcgggaagttgtggtcaaaacccaccagaccgactgtggtggaagttgatgcggaagctggagagcccgcggctctggaggggtgagccgccccggagaggggacccatcctcctttccgcgcccggaaagagcgggggagaagaggaagtccagttacaactcctttcctcagccccttaaaggaaaggtatcagctaaccacggggagctggcagcctaagagaaagtaggaacctacaatctcttaatctaagcacaagataagcaaaaagggaagcgccttagaaatgcagattccccaaccccacccctgagattccagtggaggcgggggatggggggatccctaacttgcaggaagaatttggcgagcgagaaaaggtcccctcccgcaggctcttctgaagcggaggatcccgggacgagaaatgctgcccggggggcttaaggtagccgacgatctccttgctacatcctgtgtccacgtggcagccgaggagggggtgtgggggccgcctgttaagtgcgacagcatcactgctctatccccaccacggctcccacttcgctcagataaaatgcagagctcttaccaaggctcacggccgtcccccgccccccaccgtctgcccccatcacctctcgggcctccggtgacctctcgggctacagcagcgctgacgccctgggtccctgcgcttctgttccctcggcctggaatgctcttcccccgggtacctgcacagctcgctccctcccatccttcgggtcttcgctcgaacgtccgctcctcggtgaggccttccctggacaacgcatttgaaacgtaaccccaaggcaagaagccaccttccaggcgcgcagccgaagcccagtgccaaggaggccggagactcgggtgcccgcgcatcccgaaaacagcctctgaggggtcctctgagcatccttccagcgtgtttgggaggcaaactcgttgactagctcttgagaggagtggctagaggaatccaggcggggaaggggacggtggactccaggagagtgtaatttacaaaggcggggggcggggacgcccaggtccgagtcccaggactctgcgccggacgcttcgcccgccctttcaggtcccctgcccggtcctcgtacccgcgcgggtccggagaacctctgagcaccggcccccagcccccgggcggggctccagcggcgctactcacccggctcccccgccacctgcggggccacctccgcacactcccggcgcgcaggccgcggctcctcggagttgaggtgctggggcttggcctgcttgcgccgcgacatggcgcgaggaccgggctccccgcgcgtccctaggagtggcctacttcacacaacgaattcccggagttcggaaattaccccccttcggccggaacgcgcatgtcccggcaattctgctcatcagccgagcagggcgatttatcaagagtcctgacggctgattggcctggagccaagaccccaggagtcccgcggacttgcggtccgctcccgggcagcccgcgccacctgggagctcgttagaaatgcagactctcgggctctaccccagacccgctgaatcagaatctgcattttaacaagatccccaggtgattcgcatgcacattaaagtttgagaaaccgtgtctgcattttaacgagatccccaggtgattcgtttgcccattaaaatttcagaagcgcagctctcctccaactttaatgtgcgcacgagtcactggggatctcgttaaaatgcagattctgactcagtgggtctggggtggggcctgagctcctgtatttctaacgagctcccaggtggcgctgtggctgctgcgctgcacaggctgcgcttttagattcggacttaattggtctgggctgggacctgggcactgggatgtttttttaaaaaagccgtctccctccctcaccacccccatcacacacacaggtcattctgatgtgcatccaagctgagaagcacgacctccactcctggttctcaaccctgctgcatacccaaatttaaattttaaatgaggagtgtctccaactgcagggagaaatgcagattccgaaagttctggattcaggtggccgaggccagaaatgtgtgtttttatatagcacgcgcccgctcccgccccgtgactcgggcgcaccggctcttggaccacacaggagtgcttttggggccaacccggcgccggccccgcccagcaggtgacggaggcgtggtcctcggggggttgagctaattagcgttcatgctcagactggctgggacctcgatgagacccgagggagacccctccttgcgccgcgtaattgacatccaatgggaagcaagaaagccacctacatcccccaggtgtttactttcttcaaattagggagttacttaagactgggttgtgccccaagcttgcccgaacctgagaatcacgtgggggcccttgtttcaaaaagacccagccaggctcatctccgagtttttggggcggggcctgagaatctgtatttttaacagcgccgcgtatgagttttacggggtggtcctgtggggttagcagcatctgtaacgagccttctgtgaggttaccgttggcgaaccccacggcggggcctgcgagaacggcatttttgcttaattgtttccatttctcaaaagctgacctgttttcctcaaacttccccttgattttcaggttgtgaatcgacttgggaatatttgtgtaatgcccggtgaagtcatgtcaggttaaatttccgagacttaaactttttaaaaaacacaacgcttcaagtcttctttgggatgtatgtgtagttacacggatctgtaaagacatttgaaaatatatacacgtggccgggtgcggtagctcactcctgtaatcccagcactttgggaggccgaggtgggcggatcacatgaggttaggagttctagaccagcctggccaacatgatggaaccttgtctctactaaaaatacaaaaaattagccgggcatggtggcggacgcctgtaatcccagctcctggggaagctgaggcaggagaatcacttgaacccgggaggtggagccgagatcgcgccactgcactccagcctgggcgacagagtgagactccatctcaaacaaacaaaaaatatatatgtatatatacacacacgtttatcatatctccttttgaggagactggataaacagtggttgcctctggggaagttgaaagaggggtgcatggggggatgggagacatctgagaccctcttatactgcttgaggtgtgtacatgtgtttgcatttgctttgttgttatttcacctcaggtgtacacaatcaattattggtacatgaggcattattactggcctattgttagcctacacttgcctacattttttaggctgcttgcttgcacctctgtttattatgatataataagtactagggaacctactgccccaaagtaggaccttaaccacaacctacatctctctttatatggcctcctgatgtcccctcccctcctctgccctacaacttaagaatcaacagcctgactcctacagatctcattcatttgctttgtctctttagcaagttttattgtacctacatgtattccttaaaaaaacaattttaatatttaaagaatataaaaagggtatgtaatcttccaagaataactttttttcacttaatattattttgctaagatcatccaaattgctgtcattgtttattgatttcgactgctctgtaaatattccactgtgtgaaaatgccagtttcttcacctactctcctgttgatgggcaattgggcctttgccaggtctctgccattgtgaacagtgctgctatgatctttctaaaaagtgtcagagtttctcgtgagtgagtgtgtacctgggggtggtataagagataatgccaaagtgattgtattaacttacacttccctagcaaggtataagaaataacgtaggtcagtctcagtggctcatgcctgtagttctggcactttgggaagctgaggttggtggatcacttgagctcaggagtttgagaccagcctgggcgacatggcaaaactctgtttctacaaaaaatatacaaaaattagctgggcggatgacacacacctatgctcccagctactctggaaactgaggcaggaggaagctgacccttggaagctgaggcagtgagtcatggttgcgccactgcactccagcctgggcaacagagtaagaacctgtcttgaaaacaaacaaacaaaacccaaaatgtgaagcccattctttctcacactcaggattataaaatgtcttgatttttgccaactatattgatataaaatgggatctcggtatagtcttttcttgcattttccatgtaggtataatagtagccaaaaacaaagtgaaaatgataaatgtgttccacaaatataatgacaactgattagtcttatttttgaaaaaaattgtttttactcttttgcaaaacatccaatcagagttctagtcctaaattaagtttattacctttttttttttttcttttgagacgaagtttcactcttgttgcccaggctggagtgcaatggcacaatctcagctcactgcaacctccacctcctgggttcaagcaattctcctttcttagcttcctgagtagctgggattacagacagccaccaccatgcccgacaatttttttttatttttagtagagatgggttttcaccatgtcggccaggctggtctcgaaccctggcctcaagcaatccacctgcctcagccttccaaagtgctgggattacaggtgtgagccactgcgcccggccatcatgtttggttttaatggctttatttcaaggctcaaaattgaaaatctgaaacacacacacacacacacacacacacacacacacacacacacaaacttacagggtctacagatataaatgaaagcaaagtatcattggccatgcgtaatcagtcatgattctcctctttcaatcccatttgcctattacacaggttgactattctgttgaaatccagctagaaaattttaatcttccctcataatcaggagcttctgcaaattaaagtgaagaagacacattactatattgtacctggaacaaatggatttcaagcccagggaagctcttttttttagaagatttttttttttctttgagacggagtctcactttgtcgcccaggctggagtgcagtggcatgatcttggctcacgatcttggctcactgcaagctccgcctcccgggttcatgcaattctcctgcctcagcctcccgagtagctaggactacaggcacccaccaccatgcctggctaatttttgtatttttagtagagacggggtttcaccatattagcgaggatggtcttgatctcctgacctcgtgatctgcccgcctcggcctcccaaagtgctgggattacaggtgtgagccaccgtgcctggccagaagatgtttaaacaggctacaaaaatctgttgctggctgagtgcggtggctcatgcctgtaaccccagaatttgggaggccaaggcaggtggatcacctgaggtcaggagttcgagaccagcttcgccaacatgttgaaaccccatctctactaaaaataaataaaaattagctgggtgtggtggcacatgcctgtaatcctagctacatgggaggctgaggctggagaactgcttgaacccaggaggcggaggttgcagtgagctgagatcgtgccactgtactccagcctgggtgacacagcgaaattccacctcaaaaaaaaaaaaaaaaaaaaaagaaaaaaatttgttgctaattttaaacacgtagactgaggttcttataggtgacaacttttcattgttttcagcaacaatatcacataacaagggaatcatggccaaacatgcattgaaaagtactttctgcatgggatgtttctgttgaaaactagttacttcttcattcttcatatattgcctttgtcctgattttttcttttccacttaaccaaaacactgaaactttaattgaatccaaattacacctgtcaaagacctgggccgtacactcctcagtcttctctatagcaccaattccttctgaggggtcatttcaccagccacctgagaagtgctccagctatccccacaccagctagagacatcccaagcatggctacatcggcatcaacgtccaggcatactcagagctcagaattgtaagttagtaccacttttcccaccaaccccttatatttcacaaaggactcacagccagcaggttaactctcccctccccacccctaccaaaccctggaaaaccatagagagcctttttacaactcctcgttctcagcccccttcttctggaaggcagttaggatgtttaagctcttctggagctcctccttcttcccgtcactcaacttgttctcaatcagcctggagatccatgtcatctctatgctgggaagtcctctgcctagtctaagatcttccctgtgatcttcaggtattgctcggcccagttcttctcagtctccttcacacttgagaggtggtcctgccgctgcttccagagggcctagcgggcctccacgccagaggccctgatgaactcctggccagggtgtcctatgcagctggccaccaggccacctggcatagctagctagaccccttgccccttcagccagcgctggatggctccaaccttaactgccccagtacatgggactgggttctcaaagtccccctcccgggagaggtagaagactgggtagctctctttgagcagcttgtatttctcactcagctccatgttcagcttgtcaccataatctgagatccccacctctgccaccaagagatcatcgctggaagccgagttttcagcaagacgcctgaactcatcctgcttctcaccgtagcggtactgggtgttgaacttcaccaagacgaacctgcttttgggaatgaccttgtagaaagtgaccgtatccaggggaagggcgcgcttggtgtgcaggccgctgctgccatgcggagcggagaggagcaggaagcccaggagaaggggaagcggcagggagagagacgcggagcggggcacggcggcagccacatcgccgggttccgcgacggggaggtggggaagccgtagtggagaacgccccaagtcagcggtcaattttttttttttttttttttttttttgagacggagtttcgctctgagttttgctcgttgcccaggctggagtgcaatggcgcgatctcggctcatcgcaacctccagctcccgggttcaagtgattctcctgcctcagcctcccaagtagctgggattataagtatgcaccaccacgcccagctaattttgtatttttagtagagacgggtttctccatgttggtcaggctggtcttgaactcccaacctcaggtgatctgcctgcttcggcctcccaaagtgctaggattacaggcgtgagccaccttgcccagaatccgatttttttttttaatagttgttagataatcccctttgttcacacagaaagttaataaattttcaaacattgtcgctttgtagaagaaaaatagagaatatctgtaattctcgcaactcttaagtattttgccaagagataaacagcatacttctgaattatacaacagattctcctggtcactctacctctctttacaaacattataaagatgccagaggcaggataatgtagtaactaaaagcacagtttggagccaacctgagttagaatcctggctctggctgggcacagtggcttacacctgtaatcccagcactttgggaggctgaggcgggtggatcacctgaggtcagaagtttgagaccagcctggacaacgtggtgaaaccccatctccactaaaaatacaaaaaattagctgggattggtggtgggcacctgtaattcagctactcaggaggctgaggcacgagaatcgcttgaacccaggaggcagaggtttcagtgagccaaaatcgtgccactgcactccagcctgggcaacagagcgagactctatctccaaaaaaaaaaaaaaaaaacaaaaaaaaaacaagaatcccagctcctggctctgttcacatcccacctgtgtgatctcaagaaaagtgttctgtgtcccatttttctcattaataaaatggcaatgccaagggtggcttgaggattagtgaatttatatatgtaaacaggtacagaacaacatctagtacatagatactactctaagtattaacagttatttatgataatggagtaagagttatagttatctatgaaagtagcactcatctgtaattggttattccacttaactaggcaaagttactgttttacatggaaatatatttgaagcaaacaagcatgtgtgaccttactcaacccttctgagttgcagaattcccatgctttcatagtttcaatccatatattaaatggggaaagcttactcttctttttaaagagaaagatacaaaaacaaagtatcaatacaatgttgtttctgattgtcctgggcctctggggatgtgggcaccctggttgtgttctccttcctttttttttttctttgttgggacagaatctttctctgttacccaggctggagtgcagtggcgtgatgttggctcaccgcagtctcaacttccaggtctcaagagatcctcccatcttagcctcccgagtggctgggactacaggcacatgccaccacacccaggctaatttttgtatttttttgtagagaagatgtttcaccatgttgcccaggctggtcttgaactcctgggctcaagtgatcctcccacctcggcctcccaaagtactgggattacaggcatgagccaccgtgcctggctgggttctccttcctaagcatcttcattaaacttgtatcattaatactaccattctctactatgaataccagaatgaacaaataaatgtttatccaggcacaaatgattccccaaagaggtataaaactagacaggaggcagggcgctgtggctcacgcctgtaatcccagcactttgggagtctgaggcaggcagatcacgaggtcaagagatccagaccatcccggttaacacggtgaaaccccatctctactaaaaatacaaaaaattagccaggcgtggtggcgggtgcctgtagtcccagctactcgggaggctgaggcaggagaatgacgtgaacccgggaggcggagcttgcagtgagccgcgaatgcgccactgtactccagcctggatgacagagcaagactccgcctcaaaaaagaaagaaagaaagaaagaaagaaaactagacaggaacaaatcttatttattgatcattacccttgtacccttgccaggaattctttttttttttttttttttttttgagaccaagtctcgctctggtgccctggctagggtgcagtggcgcgatctcggctcactgcatcctttgtctcctgcgttcaatcgattttcctgccccagcctcccaagtagctgagattacaaggcacccgccaccatacctggctttttttttttttttctttcatttttaggagagacagggttttaccatgttggccaggctggtctcgaactcctgaactcagatgatccacctgcctcggcctcccaaagtgctgggattataggcacgagccaccattagttcatctgataacaattctttgagcccactttattgcctgcctctgctctaggctggagatagagtgataaagacaggcaagatccagaagggattcagagaagtaaccagaaaatgtacaaggtcactttagagggcaataggtgctgtgatcaaaatactgtggtagtgtgatcgggagtgactgggtggtagtggtgggtacctgattttggctagaagtgacctttgagctaaaacacaaatgtaatagccagccatggaaagaaccagggagacagcgtccccaggggagggaggagcaacagcaaagactcttttaagcgaccaactttggtatgtttgaagcaaactaaggagattcagggactaggtagctcccagataagaaaaacatgatatgtaaaaatttgaaaaaaaatattcaaggtcacttatgattaaagaaatgttagttcaagtaaacggaaacactgattttcacctgtcccgatagaaaagattaaacacacacacatgctgagcgtgagccagctattccatgcctatgctgtatttgtcaaactcactgtgcagagaagtcacctggggatcttgttaaaatgcagattctgatgccagtgtgtctcaaaatgtaacatgtatacagatcacctggggaccttgttaaaagtcagattctgatttcagtgcttctcaaactttgatgtacagaggaatcacccggggaccttgttaaatgcagattcagggcaacaaacatggaagggatgttccatcttactaattataagggaatggctagtaaagcctgttcccactgttcttttcacctatcagatcaataaaaatttaaaacactcagaacatctactgttaggaagagtacagggaaattggttttctaatgcattgctagtgagagcatgaatgtttatagccacttttgagggcaatttggcaatacgtttttaaatatgtcctgccaatctatcaattctgctttccatcttttctcctccagagaaacatttgcacaggcgcacaagggagaatgtccaagaatgtttgttgcaagtcattgttgtagcaaaaaaaaatgaagaaacatcctcaatgtccaacaataggcaagtggctacattaaactgaggtttagccagatcatgaaataccaggccaggccgggcacggtggctcatgcctgtaatcccagcactttgggaggccgaggcaggcagatcacgaggtcaggagatcaagaccatcctggctaacactgtgaaacactgtctctaccaaaaatacaaaaacaaaaaaaattagccaggtatggtggtgggcgcctgtagtcccaggtactgggaggctgaggcaggagaatggcatgaacccgggaggcagagcttgcagtgagccaagatcacgccactgtactccagcctgggtaacagagtgagtctcaaaaaaaaaaaaaaaaaagaaacaccaggctggatttatgaatactagcatgcttagagctctaagatatattgcattaaagaaaaaaaagcaaggcccacatagatatatagatctaaacacatattcaaatatatacatattttcaatggtgaaatatatattcacataaatccagtgaaaaaagtactggaagaatacatgctcgctacagctttttttttttttttttttggagacagggtctcactctgtcacccaggctggagtgccgtggcatgatcatggcccactgaaaccttgacttcccaggctccagtgatccttaagcttcagcctcccgagtagctgggactataggcacatgctatcacacctgggtaatttttgtatttttagtagagacggggtttcaccatgttggccaggccggtcttgaatttctgggctcaagtgatgcgctgaccttggcctcccaaagtgctgggattacaggtgtgagacatagcacccagcctgtactggctacatcttaagcaagaaaaggggagaagtttggaggaaggaagattggagaacctaaatttctctctctctctctctctctgtgtgtgtgaacattatgcatagtaatatttctttctttctcttttttagatggagttttgctcttgctgcccaggctggaatgcattggtgcgatcttggctcacggcagcctccatctcccggatttaagcgattctcctgcttcagcctcccaagtagctgggattacaggcatgcgccaccatgcctggctaatattgtatttttagtagagacagggtttctccatgttggtcagtctggtctcgaactcccgacctcaggtgatctgcccgcctcatcctcccaaagtgctgggattataggcatgagccacagcaccacgtcaatatttcttttttttttttgagatggagtctcgctctgtcacccaggctggagtgcagtggtgggatcttggcttactgtaacttccacctcccaggttccagcgattctcctgcctcagcctcccgagtagctgggattacaggcatgcatcaccacgcacggcttatttttgtatttttagtagagacggggtttccccatgttggccaggctggtctcgaactcctgacctcaggtgatccgcttgcctcggcctcccaaagtgttgggattacaggcgtgagccactgcgcctggccatatttctttctttttttttttttttaaagaaaataaggaatgtattcatatactactttatagttaagaattaactaaaataaataatgatatactttcatacaatagaattctattaaactataaaaaataatgcatttctatgtacattcatatggaatattttttatgatatattaagtgaaacatccaaaagacaaagtgtacaaattatgctgttaggcatatgtgtacatacacatatatacacatacacatatatacacatatgcccaacagcataatttgcattatgcataatatgtataacataatttgtataacatcatctctatatacattttaacacgaggctgggcgcactggctcacgcctgtaatctcagcactttgggaggctgaagcaggcagatcacctgaggtcaagagatcgagaccttcctggccaacatggtgaaaccctgcctctactaaaaatacaaaaattagctgggcatggtggtgcaggctggtagtcccagctactcaggaggctgaggcagaagaatctcttgaacctgggaggctgagaggttgcagtgagccgagatcgtgccattgcactccagcctggtgacagagcaagactctgtctcacacacacacgcacacacacacacacaaattatgaatgttgtagctgttagcattcttgcttgcactgctttcctgattcacatgtgaaagtttctgtatgtccagaacctgtatttaacaagatcctcaggtgattcttctatagtttaaaatgatctgctgaaatcagaatgggcttttaataaggtccccaggtgatccatattcatgttacctttgagacacactggcatcagaatctgcattttaaaaagatccccaggtgagctgggcatggtggctcacacctgtagtcccagcactttgggaggccaaggcgggaagatcacctgaggtcaggactttgcgatctgcctgcccaacatggtgaaaccttgtctctactaaaaactaaaaaatcagctaggcatggtggtgggcacctgtaatcccagctactcgggaggctgaggcaggagaatcacttgaacccaggaggtggaggttgtggtgagctgagatcgcgccattgcactctagcctgggcgacagagcgaaactctgtctcaaaagaaaacaaaacaaaacacaaaaaagaagattcccatgtgacttcttctatgaacagtaagtttgagaagtgcagcatgggtgtggaccagctgggccatagaataggtttgcattcaacttgcctagaaatgccaagctataccattatcataaattacattttatgattattattctttttgagatggagtctccctctgcttgttctgtcactcaggctggagtacagtgatgcgatcacagctcactgcagtctcaaccccccagccttaagccatcctcctgcctcagcttcctgcgtagctggaactacaagtgcacaccacagcacccagcatattttttttttggtttgggagagacaaggtctcactacattgcccaggctggtcttgaactccagggctcaagcaatcctcctgcccagatctcccaaaatgctgggattacaggcgtgaggcaccatgcctggactatattattttttaaatgaaaaagaaactagttaagttactagtgcacaaactcagttgaaaagggaaataacccctctacaaatcttagcttcttcctcctctttcccctctgctcccacaccccacccaccccttcatggcttaaaactggaaatgaaatttggtggaggaggattctgtttgggcaacaacatggatccaagtctttatttatagagaaaacaaacagcctctaattcacctgctggcccctactggtttgaaagctcctgagctatagcagatgttcttcaagaataagaatgctaagcttccagactccagggcagggtgtggcaggcctggagtggtcagtgtcttgcctactcctgagaagaatgaattccccatcctttgtggcaggagtgaaatcacaccaattgctgttttcaggttccactagtgtctccttatcttatgccacagtcggcctgcctgacattttctactagggcatgtcctgaagctattcatttgtttaacaaacattaattgggttgccactgggggcaaggctttgctaacctttgggaatatgaaagcaagtctttaaagaagttgcagagcaatcaggaggataaataagtaaacagctatagtacagtgtgataaatatgtgataaaggttctcacagagtgggcaggtaaagcttcctcagagaggtggatttgtagccctggctatgtaggatgagatcttgggcaggtaaagaagtgaagtaggttgggtgcagtggctcgcgcctgtaatgccaacacattgggaggccaaagtgaatggactgcttccggccaggagttagaggctggctggggcaacatagtgaaaccccgtctctacaaaaaatacagtaattagctgggtgtggtggtgtgtgcctgtggtggcagctatcaaaaaaggtcgagggcaggaggattgcttgagcctgggagctggaggctgcaatgaactatgatcatgccattgcattccagcctgggtgacagagcaagaccctgtctcaaaaataaagtaaaataaataaaagcaaaaaagaagtgagttgaagtgggtttcaggtagggggacagcttgtacaaagaccaggagggaagctgggttcggtggttcacgcctgtaatcccagcactttgggaggctgaggtgggtggatcacctgaggtcaggagttcaagatcagcaggccaacatgtcgaaaccccgactctactaaaaatacaaaaattagccgggcgtggtggtgcacagctgtaatcccagctactcaactactcaggaggctgaggcaggagaatcgcttgaacccaggaggcggaggttgcagtcagccaagactgtcacttcactctagcctgggaaacagagtgagacttcatctaaaaaaaaaaaaaatatatatatatatatatatacatatatatatatacacacacaacacacacacacacacacacacatataaacacaaaaaaattagtcaggcatggtggcgtgcacctgtagtcccagctactctggaggctgaagcaggagacttgcttgaacctgggaggcggaggttgcagtgacagagaaagactctgtctcaaaacaaacaaaaaaacaaccaaacaaaaaacaacccctccccactcactacaaagaccaggaggcaaagagacggcacttttgagaaaccttagtctgactagaggtgcagggagtacaggagataaggtgaaggagttgggtggggaggaggtgtgaagggtttcatatggcaaaaagaatatgattaaataatttcctatttttcctttcccctgtgaatgtttgtgcctccccacaattcatatgttgaaatcctaacccccacatgatggtattaagaacacggctttgggcaggtgtttggatcatggagctggaactctcctggaaggaattagtgcccttataaaagaggcatcagagagctgccttccccttccaccatgtgtggacacagctagaaggtgccatttatgagaaagtggggtccttgccagacaccgaatctgccagtgccttgatcttggactttccagcctctagaactgcaagaaataaatttttgttgtgtgtaagctacccagtctacggcactttgttatagcagttagagggtgtctgggacaccctctttcccctgttaaacctcagacacatccagaggcaaatctcaggcctggtttgggaaggtgcctgagagccaatgaaggagaatgatgatcctcgtcgtggtaatgactatgaggatggaaagagggcatcgatagatggctcaccatgtgcgtatacgccactttatcgcacgtcacagacactgtgtgtttttttctttttttacaagttgaaggtttgtgtcaaccctgcatccagcaagtgtatcggcttcatttttccaatggcatgtgctcactttgtgtttctgtgtcatgctgagataattcttgtaatatttcaaactttatcatttattatatctgttaatgtgatcagtgatctttttttttttttttttttttttttttgagacggagtcttgctctgtcacccaggctggagtgcagtggcgtgatctcggctcactgcaacctccatcttccaggttcaagagattctccagcctcagcctccctagtagctgggattacaggcatgtgccaccatgcccagataattcttgtatttttagtacagatggggtttcgccatgttggccaggctggtctcaaactcctgacgtcaggtgatctgcccgccttggcctcctaaagtgctgggattgcaggcatgagccacctcacccagtccatgatcagtgatatttgatgctaccctcgtaactgttttagggtgccatgaactgtgcccatgtaagacgggaacttaattgacaagtgttgtgtgtgttctgactgctccactgaccagccagtcccttctctctccttttcttcgagcctttctattccctgagacacaacattgaaattaggccaattaataaccccacagtgacctataagtgttcatgtgaaagggagggtggtgcatctctcactttaaatcacaagctggcaatgattaagcttagtgagaaaggcatgtcaaaagccaaggcaggctgaaagctgggccttttgagtccaacagccaagtcaaggatgcaaaggaaaagttcttgggggaagttaaaagtgctactccagtgaacacatgagtgataaaaaagtgaaccagccggatttttgatatggtgaaacttttagtcatctggacggagggtcaaaccagctacaacatgcttctacgccaaagcctaattcagagcagggccctacctctacttaagtctatgaaggctgagagaggtgaggaagctgcagaggaaaagagaaaagttggaaggtaagaggttggctcttgaggtttaaggaaaggcactgtcttcataacacaaaagtgcaaggtgaagcagcaggtaggtgctgatggagaagctgcagcaagttctccagaagatgcagctaagatcactgatgaaggaggctacactgagcaacagatttccaatgcagatgaaacagcccctactggaggaagatgccatttaggacattcatagctagagaggagaagtcaatgtctggcttcaaagtttcaaaggacaggctgattttcttgttaggggctaatgtagctggtgacttgaagttgaagccagtgctcatttaccattccaaaaatcctaaggcccttaagaatgatgctacatctactccacctgtgctctagaaatggaaccatgaaggctggatgacagcacctctgtttacagcatggtttactgaatatttaaagcccactgttgaaacctactgctcagaaaacaaaatttctttcaaaagattactgctcattgacaatgcacctagtcacccaagagctctgatgtagatgtacaaggagatgaatgttgttttcatgcctgctgacacaacctccattctacagtacatggaccaaggagtaattttaattttcaagtcttattatttaagaaatacattttactcacgcctgtaatcctagcactttgggaggccgaggcgggtggatcacgaggtcaggagatcgagaccattctggctaacacagtgaaaccccgtctctactaaaaatacaaaaaattagccgggtgtggtggccggcgcctgtagtcccagctactccggaggctgaggcaggagaatggcgtgaacccgggaggtggagcttgcagtgagccgagatggctccactgcactccagcctgggagacagtgagactccgtctcaaaaaaaaaaaaaaaaaaagaaatacattttataagactgtagctgccatagacagtgattcctttgatgaatttgggcaaagtatattaacaaccttctggagaggattcaccattccagatgccataaagaacattcatgattcatgggaggaggccatcgacatgaacaggagtttgtaagaagttgattccaaatgtcatcgatgactttgaggggttcaagatttaaatgtcagaagtagctgcagatgtggtagagatagcaagagaactggaatcagaagtggagcctgaactactgcaatctcatgataaaacctcaacagatgaggagttgctacttacagctgagcaaaaaaagtggcttcttgagatgaaatctactcatggtgaagatgctgtgaatgttgttgaaatgacaacaaagggtttagaatattgcataaacttagttgataaagtagcagcagggtttgaggggattgactcttttttttttcagacagagtctcactctgtcacccaggttggagtgcagtggtggtgcgatcttggctcactgcaacctccacctcctgggttcaggtgattctcctgcctcagcctcccgagtagctaggattacaggcatgcgccaccatgcccgactaatttttgtaattgtagtagggatggggtttcgccatgttagccaggcgaacatgttcgccatgttacccagtcttgaactcctgacctcaggtgatccatctcagcctcccaaactgctggattacaggcatgagctgctgcgcccagcagactgactccaattttgaaagaagttctattgcagttaaaatgctatcaaacagcattgcatgctacggagaaatcttttgtgacaggaagtgttaattgatgcagaaaaacttcattgttgtcttattttaagaaattggcacagccaccccaacattcagcaaccactctgatcagtcagcagccatcgacctccaggcaagaccctccaccagcaaaaggattatgacccactgaaggctaagatgatcactagcattctttagcaataaaatattttaaaattaaggcatgtacactgttttttaagacataatgctattacacacttaatagactccagtatagtgtaaatatagcatatattatttgatcacaaataccttcatactgttttgttactacctgggcctcataaacattggagtcctggtttcaaagttgctttaagaatgaatgggttttgcatgagttgacatgagtgacttctgaatctccagcccctagagggtggtatgtctgttacagagaagtagaagtaagaagtgcttagtaaacttttcttttttgggggggggagggggcagagtgtcgctctgtcacccaggctcaagtgcagtggccttatctcagctcactgcaagctccacctcctgggttcacgccattctcgtgcctcagcctcccgactagctgggactacaggcacccgccaccatgcctgactaatttttttgtatttttagtagagatggggtttcactgtgttagccaggatggtctggatctcctgaccttgcgatccgcctgcctcggcctcccaaagtgctgggctagtaaacttttcttaaatgaattctgattgaaagatacattgttaaatgtaaaaaaaaaaaaaaaaaagtcagactattggccactagagtaagagcccattaaaaaggatgaagaaaaaaactgaaacaaaaaaataagcatgtgtctggatagaagttttctgaaaacacacaaaagaaaccactacaagtgattgcttctggggagcgaagttggaaattcagtgagaaaaggagaataatttttcactgcatatcacattgaaatctttgaattttttttaccctgtgcatgtattacttttcaatgaaaaatttactgtaatagacagacatatgataaagaaaaatagtaacatgtgaatgataaaattttgtggtattgagtgttcactaaaaaattcagctttgctgtatgtttgacactttttacaaaaatattgtaaaaaagtaaacattttttactttattattttttttttttgaaacagggtcttgctccatcacccagcctggagtacagtggtgcaatcactgctcactgcagccttgacctcccaggctcggttgctcctgcctcagcctcccaagtagctggaactacaggtacatctggctaatttttgtattttcttttttttttagagacagggtttttccatgttgcccaggctggtcttgaacttctgggctcaggcgatcctcctgcctttgcctcccaaagtgctgggattacaggtatgagccaccatgcccggcctaaacatttttgcttaacaaagtctcaccactatgatgaaatcaaaggccagtcctgaagcacatgcagctgtcagagggaacgaaggcatttgtggtgtgctggggcatctttcagcataaaagcaccaagctttgtttgcattgttcatgtgaaaccatctaagctagtgtcctttacaagggcaagggctgagctcacagcaatgaattctactttggtatggccacaaattctgcccaactggactcctcacttttggtgacaacagatgcaaccagagcttctctctctgggaatgtactaactacagtttgttgattacacacaccagaaactgacattgatcaatgaaaccagggtgggaatttacagcagcatgtgaaggagctgagatcattgatgggaggagtggagagccaggctcaggtgatgggcagaaagtgaggcaggcctgacagccataaccatgaccaaggcactcttccaagactgcctatgatgctgcaggtggcatactggaactgatgcactgggaaaccctaagctgcaccccactgcccagaaaccctgcagcagccatcatacactagttaaagctctgctgaaatgctgctactgtgaacaaatattaatctcttcccatagttttgtgtgcttccttggtcttgggtggcagcagctggctggccaagcctacgttacgtggttgtccagctcctagggcatgggaggagtagctggtgcctgccagcctgtaccatgtgcggtgggtcactatcttccactgagatgaacataataactggtgtctctgcacagggagaggttggacctgagcagccctaatgataactatcagccactgatggcttaacacaagatacactgggaaagcaaattattagagctgccactgaatatggctacactaattgactgcctactgtgtgcgaggtacttaacaacttaacatggttttttgtttttttttttgagacagagtctcactgtgtcacccaggctggagtgcagtagtgccatcttggctcactgcaacctccgcgccctgggttcaagtgattctcctgtgttcaagtgattctcctgtgttagcgttctgagtagctgggattacagacacctgccacacctgtctaatttttgtatttttagtagagatggcgttttaccatgttggccaggctggtctcgaactcttgacctcaggtgatgcgcctgcctcggcctcccaaagtgctgggatttcaggcatgaaccagcgtgcccggcccacaacacgtattgttttatttaattcttccctacaacattataaggtaggtacttttactatccccattatagagaagaagaaactgaaattcgggaagttatttcacgcatctgggtcagacacctgggaagatgtggagctggaatttcaacccagttctttctgacttcagaaccctttgcttaaccattaccctctactgtcaatcattctagttcttcatgggcctgtttaaaactacaactcaggcttaaaaggtctttgaatgacagcacctgcctgcttaaaggtaatctgggtgcgtctatgctttctacaccagactaggttgaaagatgccctataaagatgactgttggttgggtacaagaaattttaatactgagaaaaatttaaattctcattgagcattcaacatatcaatctttcaaattaatctgaagtctgactctccttctggagatacatggtaacttagatttggcacaaaatgaatagaattctctttaggattttatgtaaagtctcataaaagcttaggcatctccaacatcttatgccttttatgcaccgtctcctgtgaggtgctgagtcttagagccaatagggaaaatggtgcctttaatgaaagacacccatatggaggcaaacaggtggtgggcaaattgggtggggactcttatgggtaggttttccgtcagtggaaagaattttttttttttttttaaaggaagtgatatggttaggctttgtcagaattttttttttttttaagacagtcttgctctgtcactaggctggagtgcagtggtgtgatctcagctcactgcaacctccacttcccaggttcaagcaattctcctgcctcagccttctgagtagctgggactacaggcgtgcgccaccacacccagctaatttttgtatttttagtagagacggggtttcaccatgttggccaggctggtctcaatctcctgacctcatgatccgccggcctcggcctcccaaagtgctgggattacagttgtgagccaccacgcctggcccagaattttttttttaaaggaagtgatacggttagaaattttttcttttaaagggaagatttttttttttaaaggaagtgatatggttaggctttgtgttcccacccaaatctcatcttgaattatgattcccataatccccacgtgtcaagggagagaccaggtaaaggtaattggatcatgggggcggctgctgttctcatgatagtgagttctcacaagagctgacggttttatcaggggctcttcccctttcactcggcacttctctttcctgcctctttgtgaagaaggtgccttgcttcccctttgccttctgccatgactgtaactttcctgaggcctccccagccatgctgaactgtgagttgattaaacctttttccattataaattactcagtctcacacaattctttacagcagtatgaaaatggattaatacaggaagcaagacaagaagacaggatgggaagaaattttacaaagacaaatcctttttttcaccatacttgtgttgagagtgactttaaagcagtattgtagtgaaaacgtgattttcacttatccagatattgaacactgtctacagcaactcagtaggaaataataagttgaggatattcactggtagtctactactgtgtaagacagtttttgctatacaacgacctcaaaatctcagtggttttccacacaaatgtttatttatttttttcccgggtctgtgggttcactgtggctctgtggagcttggctctgggctgtggtttggattgaggtgtgttccatgtgtctgttcatttctgtttaggccatcagttactcagaatctgttctaaggcagatcactccagagcaagaggttgtgtcaaattctacagccacattgaaagcccctgttcctggactagatgtggtggctcacgcctctaatcacagcactttgggaggccaaggcaggaggattgtttgaggccaagagtttgagaccagcctgggcaacatagcaagactctctctataaataataataataatacccctgttcccatcaggtccactgatattccattggccaaagcaagtcaaatggctttgccccattatggtggtgccccacccaccataatgtcaatggacaaggtgggtaaatattctgtagctggagaaaggacagaatttgagaccattatctagcctaccatagcaactaacctgaaaacaggaataaaatcatacagctgggatgagaacagattgataaagatggacacatttacagtattaataaatgtatacctaaactgctaggtggaaaaagcaaactgatctgctttgtggcacctaacttgttattcttggaaaactgacctgagggaggtgaaattctatactgccttgtgttgagttgctgcactccaccactggagggcagcattagtcaccattttactaaagcttctgagcttggtcttccgtcagtaacaagggctgatttccacctggtctcccacagtctttaccactttcaaaagtgccccagcttggatgataaactacacgatcgtcttatatacatggtataactgtggcatttcttttccagaaatgaacaaaatttccagaagctaacactccacaaggagctccgacctttttttaaattttctttctttttctgagacggagtctcattctgtcacccaggctggagtgcagtggcacgatctgggctcactgctacctccgcctcccaggttcaagccattttcctgcctcagcctcccgagtagttgggattacaggcgcgcaccaccactcctggctaattttttttttttttttcttgagatggagtctcgctctgttgcccaggctggagagcagtggcgcgatctcggctcactgcaagctccgcctcccgggttcacgccgttctcccgcctcagcttcccaagtagctgggactacaggcgcccaccaccacgcccggtgaattttttttctttttttctttttttttttgtatttttagtagagatggggtttcaccgtgttagccagggtggaatttttttgtatttttagtagagatggggttttgctatgttgcccaggctggtctcttaactcctgagctcaggcagtctgcctgcctgggcctcccaaaatgctaggattacaggtgtgagccaccgtacccagccgctccagccttttttatttgcctttttccttctagcaaaaatgttccaattacaaataccctctgtctttccagactgccctaacgtccagtgcaccttagaatgctcatttccctcactcctccgttctttgtcttcaattgtgtaactcctatgtagcattttgactcagctcaggtgctggtcaccccggccctggcccatttcagcctcttggacctaaatctgggaaggcctgttcccagatgctcctcatggtgcctgcttctgttcctcatggtgcctctgtatcccattaaagcacatatgtgttgtgacaactcgcctgtctgcctaactagactgtaatctcccagggggcagggatcctgcctgccctgtgtcaccaccatggtatgccccggggcaattcatctttgctgaatgagtgcaatcgtcattattgtttattattataataaaacatgtcagacacacaaaaaactcctgctgcctgctcctctttcccttgctcactcttccctggccacgttcctgctttaaggtttttgcattccctttgcctggaactctgttcctctcgagatccacatggctccctcactccctcattccagtctttgttccaatctcaacttcttagggagaactactctgacccgcaggctcctctccctcatcatactcagtccctccaccctgccatggcacttaccagcttctaagacactgtatatggtgcctacaattgtgttttgtttgtttgtttgtttttggcaggatcttgctctatcacctaggctggagtgcagtggcacaatcatggctcactgcagcctcaagtgcccaggctcaagtgatcctcccacctcagcctccaaagtagctgagactacaggaatgttccaccatacccgactaatctttttattttttgtagagagggggtctccttatgttgtccactctggtcttgaactcctagcctcaagcgatgctcctgcctcggcctcccaaagtgctgggattacagatatgagccactgcaccccgtccattctgcttattatttatctgttttctcttatgagaaggcagattccataaggtcacgatcatttcctttttgctcatggaaacttcacatgtttccagaacaacatctagcctatagtaggtgttcaggaaacatttatcaaacttcttagggctgatggccatgtgacaccaggcaggctcttgcaatctctagcccctagttgtttatcttagtattttccacattactcagatcagaacactctccagggtgccaaatttaaaatacagattctcggcccagtgtggtggctcatgcctgtaatctcagcactttgggaggctgaggcgggtagatcacgagctcaggagattgagaccatcctggtgaaacaccatctctactaaaaatacaaaaaattagccaggcattgtggcgggcgcctgtagtcccagctactcaggaggctgaagcaggagtatggcgtgaacctgggaggcagagcttgcagtgagccaagattgggccactgcactccagcctgggcgacagagcaagactctgtctcaaaaataagaataataataaaataaaatacagattctcatcttcattaaaggaagggaggaagacaggaagaaaggaaaacaggaaggaaggaaaggagggaaggaaagaaaagaaagggaggagggaaggaaaggaaagaagaaaaagaagaaaggaaaagaaggaaggacgggaaggaaggaagaaaaagaaaaaggaaaagagagagaagaaagaaaagaaagaaagcaagaaaagaagaaagaaaagcaggccacaaaacaagcagaaaacaaataaaatggcaggagcaagtccttacttaacaataatataacattgaatgtaaatgaactaaagtctccaatcaaaagacatggaatggttgaatagattaaaaaacaagacccactgatctgctgcctacaagaaacacacttcccctaaacacacataggctaaaaataaagggatgaaaaagatattctatgccaatggaaaccaaaaaagagcaggggtagctatacttaaatcagacaaaatacatttcaagacaaaaactataagaaaagcaggtcactatatataatgtttataaaggggtgaattcagcaaaaagatatcgcagttttaaatatatatgcatccaactctggagcacccagatatataaaagaaacattattacagctaaagagagagttaggccctaatacaataatagctggagacttcaacaccccactttcagcatttgccagatcttcccgacagaaaatcaacaaagaaacatcggacttaatctgcactatagactaaatggatctagtagatatttacagaacatttcatcctatggctgcagaatacacattcttttcctcagcacatggatcattctcaagtatagaccatatgttaggtcacaaaacaagtcttaaaatgttgaaaaaaaactgatgtaatatcaatcatcttctctgaccacaatgggacaaaactagaaattaataacaagaggaattttggaaactatacaaatacctggaaattaaacaacatgctcctgaatgaccaatgggtcaatgaagaaattaagaagaaaatttaaaatttctgagacaaatgataatggaaatacaacatacccaaatctgtggaatacagcaaaagcagcattaaaaggaaagtttataactataagagtttacataaaaaggagaaaaaacttcaaataaacaatctaatgatggatcttaaagaactagaaaagcaaaaacaaaccaaacccaaaattagtagaagaaataagaaagatcagagcagaaatagatgaaattgaaatgaaaacataatacaaaaggtcaatgaaaaaaagctgtttttttaaaagttaaacaaaatttacaaacctttacccagactaagaaaaaaaagggaagatacaaataaataaaatcggaaatgaaaaaaggaggtattacagctgattctgcagaaattcaaaggatcattagtggctactatgagcaactgcatgtcaataaattggaaaatctagatgaaatggacaaattcctagacacaaacagcctaccaagattgaatcatgaagaaatccaaaacctgaacagatcattaacaagtaacgagatcaaaaccacaataaaacgtttcccagtaaagaaacgcctgggactcgatggcttcactgctgaattctgctaaacattgaaagaagaactaataccaatcctacttaaacttttccaaaaaagagagcaggagggaatatttccagactcattctacaagggcagtgttaccctgataccaaaaccagacaaaaacacatcaaaaaaaagaaaactacaggtcaatatctctgaagaatattgatgcaaaaatcctcaacaaaatactagcaaaccaaattcaacaatacattagaaagatcatcatgaccaagtgggatttatctctggaatgcaaggatgactcaatatatacaaatcactcaatgtaatacatcatataaacagaatgaaggataaaaatcatttgatcatttgaaatgatgctgaaagagcatttgataaaattcagcatcccttcatgataaaaaccctcaaaaaacggggtgtcaaaggaacatacctcaacataataatagccatatacgacagacccacagctagtatcataactaatagggaaaaactgaaagattttcctctaagacctggaacatgacaaagatgcccactttcaccactgttattcaacatagcactggaagtcctagctagagcaattggacaagagaaagatataaagggcatccaaattggaaaggaagaaatcaaattatccttgtttgcagatgatatgatcttatatttggaaaaacctaaggactccacacagaaaaatactattagaactgataaacaatttcagtaaagttgtaggatacaaaatcaacatacaaaaatcagtagcatttctatacgccaacagtgaacaatctgaaaaagaaaatttaaaaagtaatatcatttacaatagccacacacaaaattaaatacctaggaattaaccaaagaacatacgacctggcttcctgatgggcccacttcagggattcccctttggtccactgtgccttgggtagtggtttctgccttcttcaagaagggctttttgtctgggctggtgactcatgcctgtaattccagcactctggcaggccggggtagatcacttgagtctaggagtttgagaccagcctgggcaacattgtaagaccctgtctctacaaaaaatacaaaaattagctgggcatggtggtgcatgcctgtgaacccagctactcaggaggctgaggtgggaggatcacctgagcccgggaggtggaggttgcagtgagccatgatcatgccattgcattccagcctgggcaacagagtgagatcctgtctcaaaaaaaaaaaaaaaaaaaaaaaaggaggacttttccctattgcaggaaatcacacactcaccccactgagaactaaatgctaaggcagatttactgtgagaatgctgaaattgaggatccctccgctccccaaggccctttttaagtccctgtatttgtaattttacattttttaaaaaaaatacacttcaggccccataaaagctagatctactcctgatttaaagtcagattttatccaggctgcctctctgctaaatttctcatctactcaggagagaagcttgcctgttctgtttctggaagccaagccttccacagtaagccactgaaaacatgaactcaaatttgcaggtgttttacagcagagtcactgatttatataagcagggggttattaagatatctcagtttggtggcaagcaccctgtttatttaatcaagtgtcattgtgacttaagccagagctgctgggggactgacaacttttcagcctaaagctgcttctttgcgatgctttcaggaagggtggcatcaaggttcacaaactgccttatggcttttcaagagtttataggccattcccacgataggaaacacagtgacttggaacgttccaggaaggggtttcatatgtttgtttaatcacatgccgataacaacaacaacaataacaacagtaaaaaatcctacagaaggtctaatttttaaacagaattctccattccaacataaagagaagccataaaatacaaattcaatctaatttgaacttacggaccacttttttttgtatggtctgtgagctaggaatggttttcacatttttattgttatttttatatttttttgaaatggggtctcactctgtcacccaggttggagggcagtggcacaatctcggctcactgcaacctctgcctcctgggctcaagcgatcctcccacctcagcctcccaagtaactgggaccaaaggtgcacgccactgcacctggctacttttttgtgtgtttgctagagacagggtttcaccatgttgcccaggctggtctcgaactcctgacctcaagtgatctgtctgcttcggcctcccatagtgctgggattacaggtgtgagccactgtgactggtctggttttcacatttttaactggttaacaaaaatcaaaagaaaattaaattttgtgaggtgaaaattttatgaaactgaaatctcaatgcctatgaatggaattttatcgaagcacagccacgcccactgccctgaatattgactgtggctatttccctgctaccccagtggggctgaatagttggaacagagaagatatggcccacaaagctgaaaacatttactatctggagctttacagaaaaaacactgctgattcctgctctatggcaaaaggtctgcaaattgggagttttgtactatggaaatacacaaagatgcttttcttttctttgagacagggtctcgctctgttgctcagtctggagtgcagtggtgtgatcatggcttacggctcactgcagcattgacgtcctgggctcaagtgatcttcccacctcagcctcccaagaagccagtactacaggcatgtgtcatcaagcccagctaattttttggtaatttttgtagaggcagggtttcgacatgttgcccaggctggtctcaaactactgggcttaagtgatcctcctgcctcagcctcccagagtgctggaattacaggcatgagccactgcgccctgccaagattttcagtatatacaggcatgattggctgggttcggtggctcacgcctgtaatgccagcactttgggaggccgaggtgggtggatcatttgaggtcaggagttcgagaccagcctggccaacatggtgaaaccctgccttgactaaaaatacaaaaattagctgggcatagtggtgtgtacctgtagtcccagctactcaggagactgaggcaggagaattgcttgaatcagggaggtggaggttgcagtgagccgaaatcacaccactgcactccagcctaggcgatggagggagactctctcaaaaaaaaaaaaaaaaaaaaaaaagaaaaaaccaaaaaaaagaacaacaacaacaacaacaacaaacaggcatgattaaggacatcaattctcagatccttaacttctaggcataccttttcctaaaactgatcacctaagaacgcgcagagaaagtgacccattattaataaaccatactgaaccaatgcatggagccataaaatctgagatatcacagcatcaatgttgagaaggcaagtgattccataattgggaaagaaaccccaggttgttttcagttctttgtttttaataaaattgacccaattaatgacaactgatcaatatgtgattttctggcatagaattcagaaaaaattaaaataattgagaaatattgctataacaatacaacttgtatttctatattcttatttatgtgaataaaactcagagtttacatcaataaaaaagaatttgacacataactgaaaataaactgtatctcattctagcaactgctgaaaaatggttttttaaaaattcataatcataaagaatatataagctaactaaaaaccaggcctatctacctcattaaaatagaaaaacaccagtaccttgcttatatttaataactgtttttcaaattatataatatatatatgttgctttggtcaaaagttcctaattatcttgtttttttgagatggagtctcactctgtctcccaggctggagtatagtggcgtgatctcggctcactgcaacctctgcctcccgggcaagtgattctcctgcctcagcctcctgaatagccgggactacaggcatccaccaccacacccagctaatttttgtatttttagcagagatggggttttgccatgttggccaggctggtctcaaactcctgacctcaggtgatccacccaccttggcctcccaaaatgctgggattacaggtgtgagccaccgtgcctggccctaatggtaatttgatattgaagaaatgtctaaagcttggagccctgtgatcatagaaaataaaagatgtgaatttcaatttatatagccataattttgttgctgagaagtatgatgaaataaataataatttttaagattaataatatttcctattttgaagccctgctctctatctgagaagtttcagagatgggttctctccacctgactggctagaatgagccactgccttgctttttttcctggtaacaccatcattttgtctcaactttgctgggctacaggacctagggcatctaagaagtggatcagattgggatccaacttttcatctccaccagaacagagtttaacgactactgaagaaaaaaagatcttatgtccaagggtataattcatctgccaggacaaaagaagtcccacctatgtgcccttctgaggaatatgctccaggaagtactccaaccaaatgaaaatgaaatcagagtaaaagcgcaacatagggaagctgaagggtgtaagaaactatggtgaacaatgaatgcagtaatttttggttaaatctaaatggagatggtcaattgggaatttgaatgtaagagacataccatagggcaaaacttaacaaaggcctagaaataaacttataagtcatctcagcaaaactcagaatttgaggatggcggctgtagaagatgaagtccaaaagcttcctctcatcagggaagaatttcttaatggaagattgaggcacggttaatgtttactttttacacagcagtaggcaaatatatatttaacaatcattgttaaatattggaaagcaggcccggtgcactggctcatgcctctaatcccagcactctgggaggcaaaagcgagcagattgcttgagcccaggagttcgagaccagcctgggaaacacggaaaaaccccatctttacaaaaataaataaataaataaataaataaataaataaataaataagcaagccaggcatggaggcacacatctggagtcccaactacttgggaggctgaggtgggaggatcacttgggctggggaggtaaaggctgcagtgagccaagatcactccactgcactttagcctgggagacagagaccctatctcaaaaaaacaacacacaaaaaattggaatgtaactgtcagcaggatggagatgaatatataactttctagagataggaaataaagttaaaaaggaaaaaggagaaaaccacaaactttaataaatagcaaatattaaataagatggaagtgaataatagcacatatatattactgtaataaatacaaatgatttgaattgtcctatcaaagacaaggagaggctgataaagaaagatactgaataacagaatgggcagatatgaaccaggcaaatgaaaaaaaaatacaaaataagacttagaatgttattatgagataaagcatgatttaaggccaaaagctattattacatagaaggaacaggtacatgagaaaaaaaggaaaaaatgacaaagaacgtagaacagctacaaactttatatgcatcaaacaacatatggcaaaatataataaaaaaaaaagcaccctggtaatataaggaaagcttagttttaaaaatgcaatcctcgagagagattttttaaatatttctttcagagtttaccaaatagatacaaactaagaaaggattagaagaattgaataattcataaaaatttaaactctacagagactgtgtattcttctctaatagtcaccaaatacgtacaaaaattggtcatgtaaatggccatacagaaaactattaaattataagaagacatacaagcagccaacaagcatatgaaaaaatgctcaacatcctaatcatgagagaaatataaatcaaaaccacagtgagatagcatctcacactagtcagagtggctaccatgaaaaagtcagaaaactaaagatattcacaaggtcgaggagaaaaggaaacatttgtacactgcttgtgggaatgtaacttagttcggccactgtggaaagcagtttggagatttctcaaagaacttagaactaccactcgactcagcaatcccattaatacaaatcattctaccaaagacacatgcacgcatacgttcatcgcagcactattcacgatagcaacatggaatcaacctagatgcccatcaatggtgggctggataaaggaaatgtggtacgtacagcatggaatacttcacaaccataacaacatgaaatcatggactttgcagcaacatagatgcagctggaggtcattatcctaagtgaattaatgcaggaacagaaaaccgaacaccacatgttctcacttataagtgggagctaaacattgagtacccgtggacacaaagatgggaacaacagacactgggttctacttgaagatggagggtgggaggagggtgagggttgaaaaacttattgggtactatggtcactacctgggtgaccaaaccattcataccccaaaccccagtgacatgcaatttacccaggtaaaaaacctgcacatgtaccccctaaacctaaaataaaagttgaaaaaacaaaacaaaataaagaaaatggcataatgagagagaaaaacatttattttacgggtcacattttcagaccaaaacccagtaacatcagaaaccaaaagccaaaatatagtttcacaaattgtaatacaggcacaccttgtttgattgtccttagttttattgtgctttgcgggcgctgagttgtttttttttttttttttacaaattgaagtttgtggcaaccccgcatcaaacaagtcttacgggcaccatttttccaacagtgggggctcacttggggtctctgtgtcatattctggtaattctcacatttcaagctttttattattattatatctgttatggtgatctgtgattggtgatctttggtattactgttgtaattgctccaggctgccatgaaccatgtccatataagacgacgaaattaactgataaatgtagtgtgtgttctgactgctccacagaacagccgttccccatctctctccctctatttgagcttccctattccctgagacccaacaatgttgaaattaggccaattaataaccctacaatggcctctaagtgttcaagtgaaagaaagagtcccacgtctctcactttaaatcaaaagctagacaaggttaagctcggtgaggaaggcatgttgaaagccaagacaggctgaaagctgggccttttgcaccagttagccaagttgtgaatgcaaaggaaaagttctgcaaagaaattaaaagtgctattccagtgaacaaatgaatgataagaaagtgaaacagccttattgctgatgtgaagaacgtttgagtggtctgaatagatcaaaccagccacgacattgtcttcagccaaagcctaatccagagcaaggacctaactccttcaattctatggagactgagagaagtgaggaagctgcagaagaaaattggaagctagcagaagttggttcaggaggtttaaagaaagaagccatctccacatcgtaaaagtgcaaagtgaagcagcaggtgctgatgtagaagctgcagcaagttacccagaagatccagctaagatcgttgatgaaggaggctacactaaacaatagatttttgtttataaaaatagtagataaaaccgtctcctactggaagaagataccatctaggatgttcatagctagaggggagaagtcaatgtctggcttcaaagcttcaaaggataggctgactttcttgttaggggctaatgtagctggtaacttgaagttgaagccagtgctcatttaccattccaaaaatcctaaggcccttaagaatgaggctaaatctactgtctaggctctaaaaatggaaccatgaaggctggatgacagcacctctgtttacggcatggtttactgaatatttaaagccccatgttgagacctactgctcagaaaataggttccttccacaatattactgcttattgacaatacatctggtcacccaagagctctgatggagatgtacaaggagacgaatgttgttttcatgcctgctaacataacctccattctgtagcccatggatgagggggtaattttgaccttgaagtcttattattgaagtaatacattttgtaagactatagcggtgatagtgattcctctgatgcatctgggcaaagtaaattggaaaccttctaaaaaggattcaatattcatttatttttttcaccagaacatcaaggtgagggattcaccattctaaatgccatgaagatcattcatgattcttggggggaggtcaaaatatcaaccttagcaggagtttgtaagaagttgattccaaccatcataaatgaacttgagggggttcaagacctcagtggaggaagtaactgcagagatggtagagattgcaagagaactagaattagaagtggaacctgaagatgtggctgaattgctgcaatcttatgagagaacttgaatggatgaggaatttcttcttatggctgagcaaaggaagtggttccttgagatagaatcgactcctggtaaagatgttctgaacattgtgaaaatgacaacaaacaacttaaaatattacatagccttagttgattaggcagtgtcaggttttgagaggattgaatccaattttgaaagcagtcttactgtgagtagaatgatgtccaacagcattggatgctgcagagaaatctttcatgaaaagatttaattatgtcttttgcagcaacacagatgaaactggaggctattattttacatgaaataactcagaaacagagagtcaaacaccgcatggtctcacttataagtgggagctcaataatatttatacatgggcatacagtgtggaatagtagacattacagactcagaaggatgggagggaggtaagggataagaaattgcttaatgggcctggcgcggtggctcacacctgtgatcccagcactttgggaggccaaggtttgcggatgacctgaggtcaggagttcgagaccagtctggccaagatggtgaaacccccatctctactaaaaatacaaaaattagctgggcatggtggcatgtgcctgtgatcccagccacatggaagactgaagcaggagaattgcttgaactcgggcggcggaggttgcagtgagccgagattacgccactgcactccagcctaggcgacagagtgagacttcatcacacacacacagacacacacacacacacacacacacacacacacacacacacaaattgcttaatgggtaaaatgtacattatttgggtgatagttacattaaaagcccagatttcacctctatgcaatatatccatgtaacaaaactgcatgcacttgtatcccttaaatttataccaaaaaaggcaaaaaagaggccaagtgcggtggcgcatgcctgtaatcccagcactttgggaggctgaggcgggctgatcacaaggttaggagtttgagaccagcctgaccaacatggtgaaaccctgtctctactaaaaatataaaaattagctgggtgtggtggggtgcacctgtaatcccagctactcaggaggctgaggcaggagaattgcttgaacccaggaggcggaggttgtagtgagttgagatcatgccattgcactccaccctgggcgacagagtgagactccatctcaaaaaaaaaaaaaaaaaaagcaaaaaagaggaagagtccattgatgtggcaaactttgttgttgtcttattttaagaaattactacagctaccccaaccttcagcaaccacaaccctgataagtcagcagccatcagcattgaggaagaccctttatcagcaaaatgactgcaacttgctgaaggctcatatgattgtcagcatttttttagcaacatagtatttttaaattaaagtatgtactttttaaagtcataatgctattgtgccctgaatagactatagtatggtataaacataacttttatatgcactgggaaatttaaaaatacgtgtgactcactttattgtgatatttgctttattgtggtggtctggaaccaaactcacaatatctccgaaacatgcctgtacttgaaaaataggaaacatacctttatataacccctggattctggccctatcccctttaaagcaaccaactaaccatccctaaaactgaaataacaaagtctagaagtttatggaaagaagggcatgtcatataaaagtttatagggatggatataaggacaagttttgaatgattttgtaggcaataaagattacaggatatcctgtcagttcccagttctggattatctgcttctatagaggttagtgctctttattgttgtttttgagctattttacgacttagtttttttttttttagacacagtctcactctgtcaccaaggctagagtgcggtggcacatgatcacagctcactgcagcctcaacctccccagctcaagtgatcctctaatctcagcctctagagtagttggggctacaggtgcacaccaccacacccggccaatttttttttttattattaatagtatttgtagagacagggtctcccctatgctgctcaagctggtctggaatccttgggctcatgtgatccttttgccttggcctcccaaagtgctgagattataggcgtgaaccaccatgcctggccattttataactttgcaagttacagaaatagatagtgttgcaaataactcatccacaggactgcaaacagatttcgtttgatggaacacagctaattactactctggagatactgaccagttttggatctgttggtgaatttatttcagcattcctgattgcctatgtaatcatgcatttgttaatcctcctttgagcctgttgtgatagtttgctgattccccctttaattaatgaattaaatacttgacgtgttaatcttatatttgtaggacagtcatgattttaacttaaaaaattatcttttaacacaggtgaaggcataatggaaaatatatagctttaaatgtttttattactaaagactaagtgaacttaatacatgaaattagaataacaaaataaaatgaaagaaaagcaggggaaagaagtattaaaataaaagctgaggccaggcatggtggctcacacctacaatcccagcactttgggaggccaaggcgggcagatcacgaggtcaagagatcaagactatcctggtcaacatggtgaaaccccgtctctacaaaatatacaaaaaaattagctgggtgtggtagcgtgcacctgtagtcccagctattcgggaggctgaggcaggagaatcgcttgaattcgagaggtggaggttgcagtgagccgagatcgcgccactgcactccagcctggtgacagagcgagactccgtctcaaaaaaaaaaaaaaaaaaaaaaaatgctgaaagctgaaatgaatgaaatggaggaggggtagagaaataaataaaagcaaaagtgctacttttactttaatacaaatgactaaataagtaaacccttagcatactaagtagaagactaaaaatacaacaataaaaaaagaaaccccaaaaccagtagtaacaagaaaggtggtggacccccaaatgctaaagatattaaaatattttaaaaagaaagttaaatggaatcatagggccacgtaattgaaaatttagagcagagtaaatgatgttttttcttttgctaaatataaactactaaaattgatccagataaggtatacaacctgaacagatcagtaattacagaaaataattgggaaatttgttaagaatgttacagtgaaaaagagtatcagccaagataacagaacagataatttctgagatagtcaaactatttcaggtcaccgaaaaagaagaaaagagctccagcttatttttagagttgcacaagctccaatttatttttagagttgcataagaaacaagcaaaaatcagagatagcactaaaaaagaaaactagagaccagctgcatgtatgtgtatacagtcgttgccacttatcaacagggatccattctgagaaatagggcgtagcctatggctcttaggctagaaatccatacagcacgtgaatgtgctgagtactataggtaatggtaacacaatggtaagtacttgtctatctaaatataactaaacatagaaaaggtactgtagcccaggcgtggtggctcatgcctgtaatcccagcactttgggaggcttaggtgggtggatcacttgagcccaggagtttgagaccagcctgggcagaatggcaacaccccatctctacaaaaaatatgtggtggtacatgcctgtggtcccagctacttgggaggctgaggtgggaggatcacctgagcctggggaggtagaggctgcagtgagctgtgattgtgccactgcactccaacctgggtgatagagtaataccctttctcaaaaacaaaacaaaacaaaacaaaagtacagtaaaagtatggtataaaagataaaaatatggtgcacctgtttaggacacttatcatgaatggagcttgcaggactggaagttgctctgggtgagtcagtgggtgagtggtgagtgaatgtgaaggcctaggtcatgactgtgtactactgcagaccttataaacactgtacacttagactactctaaatttattaaaaaagtctttcttcagtagtaaattaagtatagcttattgtaactgttttactttatacatgtattaattatattttgacttatcaaaatcttttgtaataacactcagcttaaaacacaagcattgtacaactgtacaaaaatattctttctttatatccttattctataagccttttctattttatttttttcttttactttttcaacttaaaaaaaaaacaaactaagacacaaacatgcgcattagcctcagcctatgcagggtcaggatcatcaagatatcagtaggcaatagaaatgtttcagctcctcagagatctagaactagaaataccatttgacccagccatcccatgctgggtatatacccaaagggctataaatcatgctgctataaagacacatgcacacatatgtttattgcggcactattcataatagcaaagacttggaaccaatccaaatgtccaacaatgatagactggattaagaaaatgtggcacatatacaccatggaatactatgcagccataaaaaatgatgagttcatgtcctttgtagggacatggatgaaattggaaatcatcattctcagtaaactatcgcaaggacaaaaaaccaaacaccgcatgttctcactcataggtgggaattgaacaatgagaacacatggacacaggaaggggaacatcacactctggggactgttgtggggtggggggaggggagagggatagcattaggagatatacctaatgctaaatgacgagttaatgggcgcagcacaccagcatggcacgtgtatacatatgtaactaacctgcacattgtgcacatgtaccctaaaacttaaagtataataaaaaaaagaaatgtttcagctccattattcttatgagatcaccattgtaacatgcagtctgttgttgaccaaaatgctcttatgtagcacatgaactagagttgcaaaacttccagataagatattagaaaacgaaatccagcagtgttttggaagaataattcaacatgaccaagaggatttcttccaggaatgcaaggtgacttaacataccaggctatatgctacacaaattcactgtgtcaacatatttaagtgcaaaacccaaatacttacggctaacaattttaagaagatatttgataaaattcagcaagctaccctgataagtaaaactgcatcagtattttatatgaacttatcaaaagaatgactatgaaaatattaagtcttccactcaaaaacccttatttaactccattgtaaacattattcagtcaaattatgtagtctattttcattatataaggtctgtgtttctttttttttgagatggagttgcactctgtcacccaggctggagtgcagtggcgcaattttggctcactgcagcctccacctcctgggttcaagcaatttcactctaagtgaaaactggagtggaagaaaatgacctaagtaccataaaaaccattatccaaaggagtggtgtatattacattggaaaattctgaagttagaattagggacacagcaaggatgccagctgtatcagcattgtttggaggttctggctaaagcaacaggacaagaaaacaaaataagtagtaaaaatattctaaaggaagagatgaaacaatctgaaaataaaagactatatcagataattataaatcatatttatcagagaccaagaatttctaataaataccattcattactgagaatttttctttaatatagacaaatataccctattttggcttttcttgatgtttgcaacaaatgcaaaaattcctattcacaattatgataaaattatggaataataagaaaacacaggaccgggcaccgtggctcacacctgtaatcccagcactttgggaggccgaggcaggcggatcacttgaggccaggagtgcaagaccagcctggtccacatggcgaaaccccatctctactaaagatacacacaaaaaaattagccaggcatggtggcaggcgcctgtaatcccagctactcaagaggctgaagtgggagaatctcttgaacccaggaggtggaggctgcagtgagccaaaattgggtggaagacttaatattttcatagttgtgcttttgataagttcatataaaatactgatgcaatttcaataaaaatctccaaaaggttttcttttttggtgggggtggtttaggtactggataaaataacagttcctttggaagaataaatatctaagaattgctaagaacattttggaaaataatagctgggggaagctttgtaagtctaaaagattaagcttaccttaatgctagtataatcaaatatgtcatgttggccagccagatcttctttgggaatctcagatctataatcttccagaataaagaagttctggaagtatatttgtgaactttatctacacgatggcttaaattaggatttcagttttcaggaaaataatatttaacaaatggtcctggcataagtggacagtcaaacctgttcatcataacatataaatatgagttcttggcatgagctgtaatcccagcactctgaaaggccgaggtgggcagatcactggaggccaggagtttaagacgagcatggccaacatggcgaaatctcgtctctactaaaaatacaaaaattagccaggtgtggtggcacacgcctgtgatcccagctacgtgggaggctgaggcaggagaatcacctgagcctgggaggcagagcaggtagtgagctgagatcgcgccacggcactccaggctgggcgacagccagactctgtctcaaaacaagaaaaaaaaaaaaaaaagaattctggctgcagcaaggagccattgaaaaacaaataagcaagcagtaaaaacactaaagggaaaaccagtttaatctcaggggaaggatggacgttcttagaaaacacacgtgccacaaatgaagcgacagaagaatctaactacagaaaaagacagtcatttttatatggtgacagccccacaggtaaagtcaaaagacaatgacaggaggggaagaaactcagcaatgtgtgactgatgtcgggttaatgtccccaacttcccaacaaccaaaaggagggagtaagagttctaagttcatagaagagagaagcacacatggtcaaccagccctatgcagagacgtctcagaaaacgcagaccacagcaccagctaggggagtgcacaaaggccagataaccattttcacgcagcagagtgataaaacttccaaaggtagttgagctcacatcagggatgagactatcattgtgaaaattaatccgtatttatgcaagtacaaactatggaaactccgtgaaacttacacttttgaatctacttacagaaaaaaaaaaaaaaaaagctgaatatgagagtttactggggcagtcgtaatggcaaaaatattccccaaacaacctgaagaatcataatagcaagatgacggactaaagcctggcatgtctctaacacttatttaaaaaaactaggtctagttttgttgacccacaggactgtcaataaatggaataatcaaagcaagttgcagagaaatgtacagagtatgatacaattactatagaactaggaaaaaccttttctatgttatcttttgagtctacgtatattggtaagaacacagagcacctaacattacttaccttgggtggggtgagaatacggaggggctggaagttgttggcttggtgtttgtacaattctgtgtataatttattccaaagagtaagttttactgttttgtttgtaaaaagacaaaacaaccaacaaatcaaatatgcatgtgtgtacatctctatgcatgcatgtgtatgtatgtatgtatgtgtatgtattatatatggaaggcagctggtaggtagagatctaaggatacaaaaggaaatatagaatataaaaaatattatgcttaattaaactacaacttcataactggagtagaaaacatatatacgtaagcataaaaaaagattgataggggccaggtacggtggctcacacctgtaatcccagcactttgggagaccgaggtgggtggatcacaaggtcaggagatcgagaccatcctggctacggtgaaaccctgtctctactaaaaatacaaaaaattagccggacttggttgcgggtgcctagagtcccagctactcaggaggctgaggcaggagaatggtgtgaacccgggaggcggagcttgtagtgagctgagattgcgccactgcactccagcctgggcaacagagtgagactccacctcaaaaaaaaaaaaaagactgataggaagtccatcaaaatggttacaatctgtatagtttatatctggacagtaagattattagtaacttctatttttttcctagtaatattctgtttttcatattttctatcttgaatacacattataatcaggaaaaaatcctttatggttgaaaaaagtgggaaaagagaaagacataggaaataggaccatgacaatggaagtttcccagctgaaattcaaaagcagaacagtttttctaaagggctgtaagcaataagtttaaagtgacaaaattatttaaatcactaacattgtacactgcaagccttttctgtttcttaccaaaaacatagttaataactcactattatcattgatgataggaaaataaagaaattatggcaaatatagcaagtcatcaaaattgtgtccaactattacagatcaaagaaagaagaataaaagtggtagaaatgtatctaagtattctcataatattctaaatatgcttctgtcccaagagtaacctcccctcctcaccaatccttgctgacagcagaaatgagtgctattacaaccttacagaatggcttaaggtacaaatatggatgattctagcttgctctctggcaccacctactgatcaaacagcatttcaatgtaaaacaacacaatctgaattttcctcttctcaatacaacctatgctttggaaaaaatctaggtactctctcagtccactcatctggattctgcacagatattaacatctcaaaaatggtattctagaaaattctgtcttgttagtaggaactttgatcatttttgtgtctaaacagaaatgccaggattgtcagtctgaagtttcaaaatgaaaacaacagtgggatggatcactttatcactttaggtaccacatctatttaatgtgactgtggaggaggtaagatgattgtgtgacgtttatgaaaggactaaaaacctttgctgcttcagtttgtttttgattaatgactcacgccccatcattcccaaatcccaccttggctctaaagaatcattaacattcagtatattttaatcagatatcaatttattatggaaccattcattttctgctcattagcactaaacatttttttttgggtcaagtatccatgtcatattatgtagaaaatggtccttcatgccaacagacttacatgtataaaacatgaacacccccaaactctggggagtattccagaatggggcaaaagagaggctgggaagtaccatttactacacaaatgtaataagatggacagaaacctttattagagttggaaaatcaagttggaaacaaacacatgaattcactacttaatgcatttaattccaacccctcattggaatcatcttggtaacatttaagattctacaacagttataatgcgacgattcagaggtggtctcaaagttgttacagtgttaaaaaaattatagtaagcagtataaaattacaatttattatggggccagggggattcacaaccatccttaaaaacattaagagcaaaccacggccaggcatggtggctcacacctgtaatcccagcactttgggaggctgaggtgggcagatcacttgaggtcaggagttcaacatgatgaaaccccgtctctactaaatatacaaaaattagccagtcatgatgtcgtacacctgtggtcccagctactcggagggctgaggcatgagaatcgcttgaacctgggaggcggacgttgcagtgagccaagatagcgccactgcactccagcctgggaaacagagcgagactccgtctcaaaaacaaaacaaaacaaagaaaacattaagagcaaaccttttagagaattctacttaagatttctttttctcaattcctttcccccactccttttgtttttttaagcactaatctggaatggagtcggcgggacagagcaaagctggatgggctgccccttgaatgatggagtaggtctgcttgggtagttcttgctgggaagaggaggagaagaccggtggcgctgtggtggccactgcgatgttctggcctccatcgctcaccactgtcacttctgctgtcccctcctgaatcaaggcgtttaggccttcaaagtcagtgcaagtaatacccgaactggtaatgaaagtttgattgccagagccttcctgggggccacctgaggccgtggggatgagagtctggtgcagagtggctccgtccgtctgctcgtgggtggtcagcaggacagccggctgggtcattgcgcccgcctcgctcggacaccgcgaggactgagggggggcgatcagactgacctggcgcaggatctgcagccggctgttccctgggagttcctctgggttctgggccaccaaggcaggcgggacgatgttcactgcagcggcggcagcctggacgatggtgttcgcctggggcacctgatgcccaacgatgattttgactcttccctcgctgaactggggcacttggctgggctggaggggcacctggaggtgtcccacagtgaggggcgtggcgggctgcttgctggggtcgatctgaaactggagaacggtcacgtccgagttcttactctcactgtactcactgtgctgtctcttgtggctgcggagcgagtcctcccgcatgaaggaggcatcgcatatatcgcagtggaaactcttcttggcatccagcttggccacctgccggctgctctgcctgccggtgtccttcctctctagagcctcagtcttaaccatgtccccatggaacttcttcatgtgcttgctcaggttgctgggctgtttggtgtcgaagctgcagtagttgcacttgaaagggcggtcggtgcagtggatacgctcgtggatgcgcagggcggccttgctggagcaggagtagctgcattccgagcacttctcaggatgctccgactggtgcacgcggctgtgcttccggagggtggctttgctgtcacccaggaagtcgcaatgaggacacttgaagttattcccgctgtgcttgatacggatgtgcgacttgaggttccccttcatggtgcagcggacattgcagaactcgcacttgaaaggcttctcccccgagtgcacccgcatgtgccttttcaagtccgagctgattttgaacttggcgctacagagccagcactggaagggggcgtcccctgtcaacacaaggtgagtttcgataagaacaggcaggcaacaaccacagcggatccccccgaagcacacaccagaaaatcgcttatacaaggtgggtgggtgcagacctcctaactgcagcttctagcagcccctggcagtgggggaagaggggcagggcgtctttatctttccccggaacccaaaccaccaccaccggtatcaaacccagaagaaaaatgggagatcgaaaagagcaatttaattgtcccagataaaataagatttacaagtatacttgttatattctttaaaacactcaaactatctttcatacagttaatttgcccactctgctagttaatggttcacagttgaagacttttgcacaacccgttgattttgattgagttacatgttgtaacagattcaacaatatattttcgaatgggtcagctccgtgctgcactcattggagtatggttttacaatgactgaaacacccagcttatatttcatgcagatctttattaataaagatgtgtttcttgcacaaaatttatttatcccatattgccagctgcgttctttacttgtgaagttacaaaatccagctgcttgattttttttaaaaaaaattcatattcgctgaaagatgagcaaggcaagtgaaattgcaaacatctgattggataccatattccaaatttacttcctcaatgaatgccaagtccaaattatctgaggcaatgacaattcaagcaaattggcgacccctcatctcaacattgtttaagtaagcaaaatagcagctaatattcttcgatggcttccgggatggcaggcgctatgctgagcactccacaagcatggtctcgcttgatgctgggaagattgccctgtggtgggtgctattattaatattgttttttaacacagttacacagaggagaaggctgagacccagacagactacataacttgttcttggtcgccccgtagtacaaagaagggcttggattccaatccaggctgactccacaactggtatctttagatgctaggtaattatctgtgcatataactgatgtttgctttcttaggtcataaacccacaagactgggatggtgttccagctttttgacataggatctgctacttcaccatgagctgcttaatgaatgcaaacaaagatggcaggaggcaattgaacaagcttctagaacactgagaggcctaaacctaaacttgaaaaaaatgctttgtatgactgaataccaccaagatcatgcatactaaactctagaacaaggaagagtaagctacagcctatgggctagatcctgcccacagcctgtttctataaataaagttttactgaaacacaaccatgcatatttgtttacatatggttacttgcctgccataatggtaggggtgagtatttgtgatagatactgcatggcccacaaaacctaaaatatttactatctggcccttttcagaaaaagggccgtttgctgcctgagaatgttgttcttaaccttttttatgccattacccctttttggcagtttagtgaagtccatggaacccttcttagataatgttttaaatgtaccaaataaactaaaataaaaaccaataggaatataaaagaaactaattatattaaaatagttattacagagaaaaaattgtgatatgccaatgtgtgtgtttcattaatgaattcaagaatcagacctagcggcagctctagtaactacagtcatttctaaataaagaagagtgtaaaagatatttgctccatctgcagcaatcattatgaagagatttttgatttccgctggcgacaactttacatgcactgttatcagattggttgcctgttttcataattgaaggacgtgtcaaattttaatacaggctagtgaaaatgaagacgtctttgttttccccacccccattcaaggacctccttcccaaatctactcatggatttctcaggggcagacgtctgtagactcaaagtcagaatccttgctccagaatgttttactaggttttccagttatatccctgtcaaaattatagtgacagtcttttttcactttttttaagcaatctgcagaggtgagacccagaaaatccagaaaaccaaatctcgcagctaagttgcagagcttaacaacgttttttggcatgaaagcaaaggttttaaattcctttgtctttttttttttaatttaaccataaacatttctttaatgaagtatcctggtcaaatagtcccactggacactaaggtcttcaaagctaatgactatgttcattcttgcctactacctgattcccactgtgtctggcacatagcgaggtttaaagaatgttggatgaatgagcgacatatatttaagctgacaggtcctccttgagtttgggttgctactaaaacaagtgttgatgtagtctatccaattgccgaaagggtaaaaacaaaatcctattaatttacagttttaccagtgccacagatttataaaagggaaaatgaacattccacgaagaccatgcataaatggcacacactgaaatttttgaaaaacacaccttttctagaccaattttaaagatgctgctataaatagtaacttcatccttatcaatcaaaatgaaccattttcataaatgaatttttcagcttctctaacttaggctgggggaaatttctgaagcaaatcagttgggcgtcgattatgccaatgtctgaacttgctgtagattataaaaatgttcccaaatcttcccacctcccacccctcctttagcacggcctctgccatgtatgtagttaggcatgttctcccgtgatccatgacaaaagcctcaaccatgtcgttgggtttggccaatggtatgtttagtaacttgaaacaaggaatggcttgaaatgggcttgtgcactggggcttgcttgcttgcttacacctcggtcatgaccatgcggtcaatcctggcctaacctgctggtctcagaaggccaagagacatgtggagcagagctgatttcctcagccaaggccagtggacagccagcccataaccagcagatcctcagactaataagagagcccagccaaggtcagctggtttgcccagctgatccccgcatgggaaccagaaaaagcatattgcatctattgaggttttgtgggctattacgctgcatcactgtgacaacagacaatggatacagatattggtatctagaaaaagggtgacgctgtaacagaaaaccataatacagagtattggttttgagattcggttgcatgtggaggctggaaaaatggcaatgcacactacttaatggcaaacatttggtaagactgtcactcgtggtagcttagaagacagaaaatgtacatcatgagttttggacttgaataaagagataaattctaggcagaacagtgaaagtgttttataagctgcatatgataaaagactacaagaaagagacaaactcaaaaaaagaactggacattttgtaagcagaatttagagggaatatagaaagtcaaagattactggatatagtttctcatctccagccagcttctccagccagctttcccaagtaagacaaaagcctgggacaaagaccatatctaagaaactagtctcagagtgaagaccaaatgtgaaataaggggtctgaatgtaagactctttattaaaatctccaaaagagaattaagaatggtgagaattaagttggtgccaagtatgttctctcagctggacaaaggactcctaaaacccacagaaggttaaatgccaaaagtgcctataattgagtttagaaaaagaggcaagattccaaaagaactgtgggtatggcttttggcatatggatacataggaaactcacacagtttttaaagacagctctaccagcaaaactgtcaccagccttactaaaacaaaaggtaaaagacctccagcttttggtagacaggaagcaagctgagaaagtttctcaaaggtacattttgcaatctttttcagaagtagcttaggaaagtgatggaaaggatgttccaatgggcagggttaagaaccaaagagctgagccaaggcctaaccaagaaacattccctaacccctgagtagggggaacctgtgcccagaagaatttcagaaatgctatggaccagggactgacaaatgcctcccgttcttctatactactttctttcttttttaaaattatactttaagttctgggatacatgtgcagaacgtgcaggtttgttacacaggtacacacgtgccatggtggtttgctgacccatcaacccgtcatctacattaggtatttctcctaatgctatccctcccctagcctcccaccccttgacaggccccagtgtgtgatgttcccctccctgtgtccacatgttctcattgttcaactcccacttatgagtgagaacatgtagtgtttggttttctgttcctgtgttagtttgctaagaatgatggtttccagcttcatccatgtccctgcaaaggacatgaactcaaccttttttatggctgcacagtattccacagtgtatatgtgccacattttctttatccagtctatcattgatgggcatttgggttggttccaagtctttgctattgtgaatactgctgcaataaacatatgtgtgcatgtgtcttacactactttcaaatggtagaattatggtaattattttggctttttgttttacactgtatattgggtgtatcatgacagacaacttgtcttttatttcaaccgtctctagatgaagagaaaccatatccagacccaagggagatcacgcaattgtggtctttaaggctgatcctatgattggatgagacttgttaatgcattttgcctgtcagagagatgtgaatgacggtggggataaaggcggactgtggttgtttgcaaaaatggtcccaattcagcccagcgcggtggctaacacctgtaatcctagcactttgggaggttgaggcgggtggattgcctgagctcaggagttcgagaccaggctgggcaacatggtgaaatcccatctctactaaaatacaaaaaattagccaggcatggcagtgtgagcctgtaatcccagctactcaggaggctgaggcaggagaatcacttgaacccaggaggcagaggttgcagtgagctgagatcacgccactgcactccagcctgggcaacagagtgagactccatctcaaaaaagaaagaaagaaagaaaaagtcccaattcttcaccttccctgcatccccgacctttgccatgtaacactgtgatgacctctcactgtcagtgagctcagtcccgcccttgacaccaggatgaaacatgtgacttgctttagccaatgtgatgcttgacaacttatagaagcaaagagttgaaatgggcttacactggggcttgcttgcttgcacctctgccatcctcatgagaaggacaagcctgggttagtccatggtcccaggaggaagatgagagatgcacagaacagaaccagattgcctcagccaaggccagtggacagccagccagcccatggccagcagatccccagggaaatctgaaaggcacccagccttccccacacatgtggttaagccaagccaagatcaacagagttgtccagtcaacttcctgctgacctaaagtatgttagcaacaaatgtttattatacaacactgagatttcatggttgttactgcagcatgactgaatcattatctaactgatacaccgaaagaaaaaagtatgtaatttattgagttacctactctgctaattttgctgtatgttttttggtcaagctgttccatgctgaactagagtatgcttcaaaaatgattggaatgcctaaccataatgcagaatttatcaaagatacatggcttatacgtgtatttcatttcatgcatctcctcaattacacactttacaactgaataagttacaaagttatagaaagagatatacatatgtataaagttataaacttcatgattttcccctattttactgagaaaggctcttcaaggcagctgaaaagcaaaactgcaaatgggccaggcacggtggctcacgcctgtaatcccagcactttgggaggctgaggtgggcagaccacttgaggtcaggagttcaagaccagcctgaccaatatggcaaaaccccacctctactaaaattagaaaaagttagctgggtgtggtacaacatacctgtaatcccagcactttgggaggctgaggtggacagaccacttgaggtcaatagttcaagaccagcctgaccaatatggcaaaaccccatctctactaaaaatacaaaaaattagctggacgtggtgcaacatgcttcttgggaggctgaggcacaagaattgcttgagcctgggaggtggaggttgcagtgagctgagatagcgccactgcactccagccagggcaacagagcgagacaaaacaacaacaacaaaaaaaaacaaaactgcaaacaacgggatgagcaaaggttccaactcgatttcttacattgtggctgaatgctttaaggtgcttatgatttatgccatagaaagtgaggagcgtagagagcaaataacaggcaggactcacccgtgtgggatcgcaggtggacagtgagctggctggagttgcggctggcgtaggggcagatctggcatttgaagggccgctcgtccgagtggatcctcaggtgcttgttgaggctgctgctgtcggcagcggcgtagtcacacgtcttacacttgtagggcttcacgcccgtgtggcaccgcatgtgagttttcagcttgtctttccggctaaagcacttgccacagacttcacacttatggggtttgtctccttcaaacacatacacacacagatggcagcaggaaacaagattaaaaaaggaaaaggcttatttcccactgccttacgaaaaaagtcatatacaaccaccgaagaatattccaaaaaccctaaaacactgggtggatgattggcaaagagctaacatcttgggagaggggaagtttcttccatgttccttattggtattacttgaatttttaaaatgatgaatatgaatttcttataaattttttataaattaaaaatagaaggcaattaaaattttaaagtataggtacgtaaaatagtaacagttttgttaattttcccttgtattcactctctcctttttccttttcacaacagagatgcaccgtaaaatttagaatacctaagtttcagcagagttcatggctcaccagggaaagattacacttctcagcctcgcctgcagctagctgtgatctgtgactaagttcctatcaaagcgatggcagagaaagtaaagtgtgtctctttcacaagaggaaacggcttgccttttacattttctcttttcctgcttctagccaaggcatggggataaggcagcaggtgagggcaggtgagtgagtcggtgagcgcaggtgagtgagcaggtgagggcaggtgagtgagcagctgagggtggcatacctgcagatggtggagtcatgtaatagaatgaggtgggaggaacttaagtgcctggctggtccctaggacagagctgcccacctgtcctagcctgcctgctcacctccggacagttacacgggacagatacaaatccctatcttgtttgagctggtgtttcagtttcattcttacagcagcttaatctgaacctcactaatgctatgtcaacttgacatctgtgaactactgctaactttttgatgtatatttttccaatctctgtgtgtgtatgtttttggtacataaaaattcctggctaacatcaatttaaatacttcctttttgaatggcactgtgcctttgaattactttagttaatccttgcaacagctggaattagaacccaggaccgtcttgtgattgctttctttttttttttttttttttttgccaaatactgcactgcctccctattgactactttcttgcatgtacggtaatttcgatcacctgtttcatatcattacatacccacaacgcggttgttaaggctgaaatatttcactgtatggatgtgcataaattactgaacccattccttacttggccatgaaaaagagtaagtcgatatgacatactgatgtgaaatgatgtgcaatagtaaatgaaaagaagcaagttgcactgatagcgtgtatcatattaacttagtaagacatggaaaaattaaatgtgtgtgtttttagacctggtctaggcatgcaaatatttcagaatgagacatagaggtctattaggagagctgacttttggtcatggaaggaggtggctgtgaatcaggattttcttttttttactttatatatcaaatatgtattttcaccaaatcgtaactagccaagtgctaaaatagccaaagctgatcactgtcgtcataaataaatatttgggatttaagaatacatctaaaagtttattaaagatcagcattttggctgggcacagtggctgtcacctgtaattccagcactttgggaggccgaggcaggcagatcacttgaggtcaggagttcgagaccagcctggccaacatggtgaaaccctgtctgaactaaaaatacaaaaattagctgggcatcgtggtgggcacctgtaatccctgctactcgggaggctgaggcaggagaatcacttgaactcggaaggcggaggttgcagtgtgctgagattgtgccactgcgctacagcctgggtgacagagtgagactccatctcaaaaggaaaaaaaaaaattagcatttttattattaaacattttagtaggctgggcgcggtagctcacatctgtaatcccagcactttgggaggccgaggcgggcggatcatgaggtcaggagatcaagaccatcgtggctaacacagtgaaatcctgtctctaccaaaaatacagaaaaactagccgggcgtggtggcaggcgcctgtagtcccagctactcgggagaatgaggcaggagaatgatatgaacccgggaggcagagcttgcagtgaaccaagatcgcgccactgcactccagcctgggtgacagagcgagactctgtctcaaaaaaacaaaacaaaaacaaaaacacaaacaaacaaaaattttagtcatcaaatttaaaaatccaggaacaataatttaccagcattgtcagtggctcagtagttcctgcggtcactacactgtgtatttgcaacactgggcaaatgctggatgttggcagagctcagtggtttttggccagctctgctggtaaagagccctgttgctgtggttcccccaaaccccaactccaggggtaattaagcatacccccactctctgaaggtaactaaggtgaggatacatttaaacttgaaaatgtagacagagaccgcagaaactatcctccaaacacaaggtaggctaactgtagaagatattttctgcggatttgcagaaatagacaaagctgtggccctcacttgtacttttacaacgctttctctatcatcattaataattatagtactcagccagatgcggtagcccacgcttgtaatcccagcactttgggaggccaaggtgggtggatcacccaacgtcgggagttcgagactagcctgaccaacatggagaaacctcgtctctactaaaaatacaaaaattagccgggtgtgttggtgcatgcctgtaatcccagctactcaggaggctgaggcaggagaatcgcttgaacctgggaggcagaagttgcggtgagccaagattgaaccattgcactccagcctgggcaacaagagcgaaactccgtctcaaaaaaacaaaaaccaaaacaaaacaaaaattatagtactttattctttcaataataaatatgctatggcttgatggatgaaacttcaatatatgaaacccacatggagagtttaattgcttattacactagaacgcttaccaatcaatacttgaaacttaatatttggataattagaacaaatccagatagcatgacactgtgaggctgattagatatgatggtgaccccagtgcaataaggcacttattggttatggccaaggaatgtaagaaataactgttggttactcatcttccaaaggctgaggctaaatagcaggctttgggcaattagcgaagccaaagccaaaactccctgcatcttatacacatttatacttttaaaatttaaatctgtactatttgaatacaagcatataacacttgttaaaaaaaagtctgaaggcaattccttttccatgcagaaaatctgggaaacataaaaataatatattaaagaaaaataaaatcaccagaaatcatcacttttttcttttcccatgcattgatctttctctcttcttttaaaacaagtatttattaaattctcctttctaaattacaaaaataacacacactcactgtattcagtgatataacataaagatacataaaatgaaagttttggccaggtgcagtggctcacacctgtaaacctagcactttgggaaggcaaggtgggtggatcgcttgagtccaggcattcgagaccagcctgggcaacatggtgagaccccactctctacaaaaaatacacaacattagccaggtgtggtggcgtctgcctgtagtcccaggtattctggaggctgaggtgggcgggtcgagtgccaccgcactccagcctgggcgacagagtgagaccctgtctcaaaatataaaagaaaaagacaaaaaaagagacagtttcttttctctccccttattcctctctttactaatcattacacacacacatatgaactcgtagggtcatctcctcaaaatgagaatatgtgcgttcaaattttaattaattttggcagaatcattttcaaaatggctgtaacagttcacattcccacttagctaagtttgctcacatcctctccagagctggattttattatgttaaagatttttctgccaaagtcatgtgtacaaatggcaccttattttttaaaatctggacttgtattcccataacagccagtgacgtttggagtggtatcattcgtctgacctatgtggatccccatctcctagcacagagcaggtgttgagggcatatgcgctaaagaaatgctacttacccgtgtgaatttttaaatgccgctccatgtccttcatgccataagcagtcttgaattggcaacctaaaaaaaaaaaggaaagattaattacaaaggaaaacttagtaacttttagcatggagaaaactggtagaaacatccttaaccaagtgacaagagttaacaccacggtaatgggaaaaagagatctcatgtgccttcatatgtgatgaccgggaaaaacacaccgtcattttgtggttcctgccaaaactgcataacctgaatctgatcataaggaaacatcaaataaacccaaactgaggcccttttgacaaaaatcactggcctatacttttcaaaaatgtcaagcttatgaaagataaatgcttaactgttcttgattagaggaaatgaaagacataaaatctaaatgcaattagtgatcactggttggagcctggatcagaggggaaaaatgtcattcttttgatattggtagaaaggacatcggtgggacacttgatgacgaaatctgactaaggtcagtaggttagataatagttcctataaatgttaattttctgatcttgatgattgtcctgtggttatttaaaagaatattctggtttttaggaaatacacactgaagtatttaggaataaaggggcatcacattgtcagcaactttcaaatggtttggggaaaactatacttgtatatatatttgtatatatacaaagaatgacaaagcaaatataataaaatggtaacatttggggaatctagatgaagggcatacagggatttttttggtacaatttttgcaacttttctgtacatctgaaattatttctgaataaattaaaaccaaagtaaggaaagaaaattcttactggatatcttcctaagctatagcataggaaaaaaatttatagcaacctgaaattttcacgagttccacttcaaaggcctatggctagaaaagtcttagaacccagaggcagaatgaccacagacagtgggagataggttgtatgtgctgatgtaaatgccagggggctctgatttttatgccaggtagtttggaacacatccatgagcagttgtcaggaactcatgaggaggagccctggagcctggttaaatatcacaccctctacacaagtaggacataatgctgcctttacctggatagcaacagttaagccttttctgagcaggtggtgttgtgggctttttggtgcgtgacttggcagggagagagatgacagtggctgtctggttttcattactttccgtgggcaggtaagtttgatagccatgttcaaaaacaaattctggagctgaaactaaaagatatggtgattattaattttcttaatataaatgcccgctagctatggtgtctgcctactttcctttgtagagagaatgcatgtactagtttgctttcccagcctcccttgcggcttcacagtgatcatgtgacccagttctagctaatgagacactagagagcatccgctgggagacttctgcaaaagactttcctccctgatttaaaatagcatgggggggcagggtgggcagggcagatggtaaaagaagcagttgagaaaagctcatcttgctgccctggctgccctacttcctgtctttgtatatgctggagtgatgatgtgatgcctggatctgtggcagccattctgtaaccataagggtaaacatggaaatcagatgctgagtcagagctctgaagccacccaaatctatacttttttcttttttttttttctgagatagggtttcattttgtcacccaggctggagtgcagtggcatgatcacagctcactgcagccttgaccttccaggctggagcaatcctcccaccttagcctcacaagcagctgggactataggcatgcaccaccatgcccggctaatttttgtattttttgtaaagactggggtctcgccatgctgcgcgggctggtctcaaactcctgagctcaagtgatctacctgtctctgcctcccacattgttaactaccatgcctgccctagacttcttaaataaacaagaaatgtccctataatttatgtccctataatttatgccaggtaagatttctgttaactgcagccaaatgcattaagtgctttcataagctatatgacaaaatcctaatgaaacaccaaaaaggaacgatagaagggatttggggcaaaattagtctaattaacattcttctcagcataagtatttccccccctcaaaaaattccttgtactcttactgaggttctgaagcaaaaagaaaaaaaaaatagcaaaacacagactaaatataaaatataattgtaggctgggcgctgtggctcacagctgtaatcctagcagtttgggaggctgaggcaggtggatcacctgcggtcaggagttcgagactagcctggtcaacatggtgaaaccccatctctactaaaaatacaaaaattagctgggcatggtggcgggcacctgaaatctcagctactctggaggctgaggcaagagaattgcttgaacctgggaggcgggggttgcagtgagccaagatcgtgctgttacactccagcctgggcgacaagagcaaaactctgtctcaaaaaaaataaaaaataaataaaaataagtaaataataaataaaattgtaaaagataagataggcagtctcaaatttttttgttgtaaaaaattaagtgactactttgttaactacatttatagtctgggacttaggcatgtttcctccctcccttcctccctcccttcttctctccctcccttcctccctccctccctcttcccttcccctccctccttctcctcttccccttccctccctcccttctttccttcctctcctcctctttctttttctggttctttcttagaatgtactttgtcatatgaagattgggtttcaaataagaagtaaatatgaccaatggaggcttgttcattggatgaacctgtcaggctaagaggccctaatgatgattttgagagccgctgtaatattctgtttcccaaacttcagtcactcagacaccacctttgacatttttgacattttatttacagattatttaagtcaacacaggcctaacatcactgtttattttagctttgtccaaagcactaatatccatgccacaggctccaggtgctagtttgttttctcttaaacactatatttctttgaatctaagatgttttagattgtaaaatgtgtcataatttcatatatgattaaaatgctgccaattaaacacattatgacaactctttctttttttaggtattttattttatatttatcgaatgggcttttcctgacttctttggacatttggcaggaaacccaagttcctgatctccatctctttggcaccttcagtagtgatcatatcactctgatacacctcaaatgataccttggtgctgtcagcatttggtatttgagtaaagccacagtttccatttttctcaatggaaatatgtgtagggaagtcaagggctttggtttaaagtcagctgaaagattcagacaaactgatgtttcctgttatcatgccaagtatctctgatgcatgaatcagctgcacctgtctcttgttgaaatgttttcatttgctctgtgggatctggctatttctcctggtttctctcgctctgcttggttctcaaagcatggtccccagacagcagcattggagctgcctgggaacttgttaccaaagcaaattttttgggccccatctcagacctactgaatcagacactctgggggtgcacccaacaatctgtgctctaacaagccctccaggtgatcctgatacatgctcaagtttaagaaccattagcagagaccatccttttccacctatcttggcagtagaacttaacccagctctgtctatatgaggaattccacctctctcggttgttgctttgcaagaacgtgcaactgcagtcactcctccaacactgaagatttgcttcattaatatcagatttaccccgttacggttttcaggcatttctgggtaagcaattacttttcatcttcaacttgcttcatcatgcaatatcttggaagacattttaaacagcaattaaactcaatacatacagttccaaaattgcacacaatgcagctgaggtaagaaaaatgtgacccactgaaatcaagtttgttcacatgcacagcaaggtaatgtttttggactgcctgctggttgacagaaatctcactaattctaaaatgcatcgttgtttcagatatgttaaaatgtgtcttcagactgatataagttcaggtttgatcattcactatggatgtgacctcaggccagttatgtaacttcattgaacttgttttctcactataaatggggacaatcaccatgcccacttcataagggtgttgcaaagtttaacaagagaattcagtagcacaggatgtggccatggttgaatctcaataaatgtcaacagggatatattacagttcaatagaaccagactctggcacttgtgcatcaaactctcaactgaaatgctcatgagctaggatgatcaaccatccctgtttgccttgtagtggagtttctcaagaattttggtgctaaaaccagggtgctgggctatggtcatactccatggcctcccaaccttctgctctacaacttcctgcacaagtgaccccctgtgctggaaggtgttcacagtggggtgagtatgggtggccaggtcctccctacaagtcagctcgcgggctcctcagcactctcttgaaaggtaggtggtaggcccttcaccctcctgccactttctgctctctccagagattggctgggctccatctcttaactgtcctctaccataagcctgggcaagtcacagcagagggaaacacaggagtattttggatatcaaccccttctcagatgtataatttgcaaatattttctcattccataggctgtattttcatttctgctgtttcctttgatgcacacaagttttaaaatttaacgtagtcccagctgggtgcagtggctcacacctgtaacaccagcactttgggagcccgaggcaggcggatcacccgaggtcgggagtttgagaccagcctgactaacatgaagaaaccccatatcgactaaaaatacaaaattagctgggcatggtggcatatgcctgtaatcccagctacttgggaggctgaggcaggagaatcgcttgaacctgggaggcagaggttacggtgagtccagatcatgccattgcactccagcctgggcaacaagagcaaaattccgtctcaaaaaaaaaaaattaatatagtcccatttgtctgttttcacttttgttgcctgtgctttggtgtcttggagaggcagcaggaagcatcatgagtgggcaggttaaacacagcaaagggccgggcgtggtggctcatgcctgtaatcccagcactttgggagcctgaggtgggcggatcatttgaggtcaggagtttgagaccagcctggccaacatggtgagaccctgtctctactaaaaacacaaaaattagccaggcgtggtggtgcgcacctgtagtcccagctactcaggaggctgaggcaggagaatcgcttggacccaggagacagaggttgcagtgagctgagatcatgccactacactccagtctgggtgacagagggagactccatctcaaggaaaaaaaaacaaaacccaacagcaaagggattcaggcacccaggtgcagggatcattttggggcagggctaatcccatgtaacctgcgagtcatcccaaagtagatggctatagaccagaaagggtttgctccagagcttaggctgtgtcttacctccttggtcctcagtttctttacctggagaatgtggacaatttccattcctatctcctagggctgctgtgaggatcagaaaccaggcatgtaaagctgctgttgctgttgactttattcactaatttattcagcaaatatttattaggtactgtactgactgtgtgccaggaactgttctaagcactagaaacagagcagtgactcagagacaaaaatccctgccctcatggagctgacactctagttaggagtggtgcatgcaataagtatttaaatatatagtgtgcaaatcaagtggtgtaaatattacagagaaaaataaagcagggaagggaaccaggaaatgctggtgggcatgcaattttaagtaggtccaggaaggcctcagtgagaaggtaacatttgaatataaaacatggaagcatataattattatattaatagtattctgttgcaggtgtccagaattcaatagcaacaaaggggcattgggtgctgaagactctcatccagatggtcggcttgctggcgcctcctagctggatttatcaagggtatcccttcccacacacgtggcctttctagaatctgctgtgaacagcaggacctgcagagacaccccagggaaaggcttatggtaatcactgagggactgctggcaaccagaggcctcctcatcccctttggttgtttgcatgtgatttgatgccggagtcgccactcatccccagggggtgtgtgtgcatatgtgtatgtgtatgtgtatgtgtctgtgtatgcgtatgcgtatgtgtatgcgtatgtgtatgtgtatgtgtctgtgtgtgcgtatgtgtgagcatgcatggtcagactgaccttggaccaatttgggtgttttatttcattttttttttagatggagtctcgctctgttgcccaggctggagtgcaacggcgccatcttggctcactgcaacctccgcctcccgggttcaagtgattctcctgcttcagcctccctagtggctgggattacaggcacacaccaccacacctggctaatttttgtatttttagtagagacagagtttcaccatgttggccaggctgttctcaaacttctgacctaaggtgatctgcctgcctcggcctccccaatttttttttttttgagatgcagtctcgctctgtcacccaggctggagtgcaatggcgtgatctcggctcattgcaatctctgcctcctgggttcaagcgattctcccgcctcaacctcctgagtagctgggactacaggtgcctgccacagtgcccagctagtttttgtatttttagtagagatagaattgcaccatgttggccaggctggtctcacactcctgcctcaggtgatgtgcccgcctcggcctcccaaagtgttgggattacaggcgtgagccaccgcgcccgaccaactgggtgtttgtatgcaatttgatgccagagtagccactcatccccaggtgagtgtatgtgtgtgtgtgtagtggaccttggaccaacctgggtgtgtgcatgtgatttgatgctgcagtcaccactcattgccaggggtgtgtgtgtgtgtgttggtgtgtgtgtgtgtgtttgtgtgtgtgtgtgtgtacagtcagattgaccctgggccaacctctgtctcctctcactagctatagggccttgaccaagtcacttctctgctcttcagttcttttgtcggtaaaatggggatattgcagtgatctcagagcttagatcttgttgttctagtaaagattcaagggaaggataaggcatactgcaagtcgggcacactgcaagttcttgagaattctcagtggacattacggtaactatgcataataggttattatttatctgtattcaggtttggcataatgagtggcatgggccttggggaatctcagagcaccctagaagaaggtgaaacgccccacatctgctgaggcgggatgactcataaccttggggggaagtgcttccagtagaggcgtgacttgcccacgccccaagaatattctctagtccctcttttcaccgagaatgcagcacgggccacctctttatgtgggggtcttatgtctaactttttgcaagagctcagggcttcagcctctaccctggtgtggccattaaaatcaagcctcctgtttagtgagatcagaccctgtccccgataccccaagaagctcacagcctcacacacctgctgcagctttcaggtttgttttctggctccaggggatttcccttctttcctgcatgttcaggtgtgcatctgagaattgcttattgtatttagttctggtttgtagcaggggcatattcagttatttgatcatgatgttgtttaaaatgtatgactgttatatgaatttcatgaaatagataatccacatctatttctctgaagtttgtctctgtggagtcttagggctcacatgaaccaaccatagctccttttctaccaaattgcctttcagacatctcaagacagctttgatatctccctatctaatttgcttcccccttcccttcttcaacttaaaaattccatttaacaaatccttttctctttttaaatgacaatgtttatttttgcaaaataaaagttaacatgaattttaggattttcttctctacacagaaaagttgagagaagaaaaaactaggctaagtgtagtggctcatgcctgtaatcccagcaatttgggaggctgaggcaggatgatcacttgagaccaggagtttgagaccagcctgagcaacacagggagacgccgtctccacaaaaccatacaaaaaatagctgggtgtgatgctgtgtgcctgtagtttcagctaattgtggggctgaggtggaaggatggcttaagctcaggagttccaggctgcagtgagctatgattgcaccactgcacttcagcctgggtgacagagcaagaccgtctctagaaaaacaaaacaaaaaacttcccaatgctgtcaaaacatggcaatatacatccttgcttttttttttttctttttttttgagacggagtctggctctgttgccaggctgaagtgcagtggtgcagtcttggctcacagcaacctccgctacccaggttcaagtgattctcctgcctcagcctcctgagtggctgggactaaaggtgtgcgccaccatgcctggctaatttttgtatttttagcagagatgggggtttcaccatgttggtcaggctcatcttgaactcccgacctcaagtaatctccctgccttgatctccaaaagtgctgggattacagatgtgagccaccggtgcccagcctacatccttactttttatacaaagctcctatcgctactgtgattaaatacttatttgagaaattattaaatgactattctctcttctatttggttggaggagttaagtgaggacagacccttgtttctttccattactgttccccctgcacccaccacagaaccaggtgaaggggaggagctcaaagaacatttgtttaattaatgatcagctaaagggctaacctcttttatatatagaaaatatattttagggccgggagcggtggctcacgcctgtaatcccaacacttttggtggctgaggcaggcggatcacctgaggtcgggagttcgagaccagcctggccaacatggcaaaactttgtctctactaaaaatacaaaaattagctgggtgtggtggtgggtacctgtaatcccagctactcgggaggctgaggcagaattgcttgaacccgggaggcggaggttgcagtgggccaagatcgcgtcattgcgctccagcctgggcaacagagtgaggctccatctcaaaaaaaaaaaaaaaaaaaaaagtatattttaaaagtataaaactaggatcatggcttaaatcatttaatatatatttttaatgaaacacttttgccatgttaaaacatcttatcatgttgtcattcatcgaaaacacaacctctaatggccacataatatttcatcattttggttgctgaatagtttaaccatttccctttcttggacatggaggagacatctaggaattgacttttatgagtaaaacctgtccagaagtttaaatttatccctcatttctttgggtacattccttgaaattgaagacttgggttaaaatggtacagatgttttattacttggtgattatataattataacatcctttcagaaaactgaaattatttgcattttccccttaaccttggctgtcacagagacgacttgagaggacaaaatgagatcacttgagtttaacttgcatttcctttacatgtaattagtgagattaaactccctttcaacatttatttttccaatgacatgccttatttggtgaacttcctgtttattctattagctcattttttctattggaattttaatttttttcttgatttgtaaatgctttttgcagattaaggatactatcttttgttttgttttgttttgtttttgagacagggtctggctctatctcccaggctggagggcagtggcaccatctcggctcactgcaatatctgcctcccaggttcaagtgattctcctgcctaagcttcctgagtagctgggataacaggtatgcgccaccacgcccagctaatttttgtattttttgtagagacggggtttcgccatgttggccagcctggtcttgaactcccagactcaagcgatcctccctccttggcctcccaaagtgctgggagtccaggcaagcgccaccgcgcccagcaggatattatcatatattcaggtctcttgatttttttgtgtatgttgttttttgcagtgtcgttcatgcttaggattctcatttagggttcttgatctccaggcaagtatcccaactgtaaactcagaattcactgtctgaggccgggcatggcggctcacgcctgtaatcccagcactgtgggagcccgaggcggtcggatcccttgaggccaggagtttgagaccagcctggccaacatggtgaaaccctgtctctgctacaatacaaaaattagccggacgtggtggtgggcgcctggaatcccaggcacgtgggaggctgaggcaggagaatcgcttgaacccaggaggcagaggttgcagtgagccgagatcgcactacactccagcctgggtggcagagtgagactccgttcccttccccccgcacccccgctgccgcccccgcccccaaaataattcattttctgagagaaaagagaaaatccacccctttcacttacgctgttcccaaacggcctttaccgtccacagtgggcgttagaccggcccaaatgtccctccccaggggtgagtggcgctgccctgttggaagccctgaccacgccccagctctgcctttgctgattggtgcagtggaagacacctgacagcaactgggccaatcgagtctcttgctctgaaattgaatcctgcagccaggcgtattggcggctgccgttaaagtcccaactatgacccagactgaggtgggagcatctctggagcccaagagtccgagtccaacctgggcgacgtagtgagaccttccccccacccgcccaatctcttaaaaaaacccaaactgagactaagacgctcaggtttggtgtggactttccttctgaacaaagaagacataaactttgggaatggtcacagggcagcagtgcttatccaaccacaatctctctaaaatgtggattctgatcagcagttctgggtggggccgagactctgccttcccagcatttccaacaagccctttgagctgtacagtctggaaaaccctaaaatatttctagcttctggttcaatctctctttttttttttttttgagacggagtctcgctctgtcgcccaggccggactgcggactgcagtggcgcaatctcggctcactgcaagctccgcttcccgggttcacgccattctcctgcctcagcctcccgagtagctgggactacaggcgcccgccaccgcgcccggctaattttttgtatttttagtagagacggggtttcaccttgttagccaggatggtctctatctcctgacctcatgatccacccgcctcggcctcccaaagtgctgggattacaggcgtgagccaccgcgcccggccggttcaatctctttttgagatccagctgcgtgcctgcctataattctcccttatgcctatatccttctaaacaaagtctcccctctggcttgaattatagccaaagtagggggtctgttctaagcaaacgaacagtcctatataacggaaaattaacttgccctatactgggacttcaccaaacaggaaaaataaaccatggatggaacagagcttcctcccacatcccaccctaccctccctccctcagtgggccgttcattcattcctcagatctgttgagcacctattgtgaactagactctagtgccagtgggtttccatcccttcaaccccttctggttgaatggttctcaaatttgatcatgcatcacagattctgatgcagagatttggggtaaagtttagatatctttatagctgtattttaaacacattttccaggtaattttttgcacagcagcatttgagaactgccactctagtccctttaacgaggcagtggtaggaacgtggccctgcggaggggacttgggattgggttccactggtaggccccttctccttgtcccttggcagcctaactgcctccactacagtgcaactgggcaaagccatgtgtcccagttttggccagcaggatctggagttttgggagttcatcagggagcatttcctccctgatacatttaatttgctcctttccctgcttgtgggtgtgcctgagagatctgatgcccaaggcattagccgccaccatgcggccatgcggaggacgcgagggcaaaggataaaagcccaccaccgagaacaggaggaagacggaaagaactccgcacctttgagctgccgaactgaccttgcctgttctggctatgagagataatatgtgtctttaactgttgtgcacacttttagtttgctgttgttaagagcaacagaggccgggcgtggttgctgacgcctgtaatcccaacactttgggaggctgaggcgggcagatcacgaggtcaggagttggagaccagcctgaccaacatggtgaaaccccgtcactactaaaaaatacaaaaattagctgggtgtggcagtgggtgcctgtaatcccagctactgaggaggctgaggcaggagaatcacttgaacctaggaggcagaggttgcagtgagccgagattgcaccactgcactccagcctgggcgccagagcaagcctctgtctcaaaaaaaaaaaaaaagaaagaaagaaaaaagaaaaaaaagagcaaccgaaagcatctgacctgacccaaccactccctggctggttcagattccccggaccttgctcagaccccctaatatattatccccaggaagggtctggatatctgcatttttcacggaagcttcagatggttcttatgcacaagcaagtttgagaaacatcgcaatgaggaatttactaagtggcagtactgattaagagcacaggttttgcaaccagacagcctgggtttgagacccggttctgccactttctgtcatctggacaagttatttaacccctctgtgcctcagtttcattactggtcaaatggggataataattattattacctaacttttggttacaaaaaactactttatatagagtacttagaaaagtgcatggcatagaatgagcactgtgtaagaatttgctattattgtttccagatccttctggcaatcaccacatagtttgtcttactaaatcactcatgtgttcaagaactttcaatggatccccagctccttcagaataaaggacagagctgaagcatgactcccaccacgttcccctgtgccatctctagccactgttttcaaatcttgccctgagcttcccccaccccctccaaaccaccattaggaaatgccccctttcccaccgtctttctcccaaaagccaatgggtctttcaaagccggttatacatttgctttcattcacagttctcccccctgactttcccagttggaaccaacagtctctgtgaattcttcacacctttaagactacacttgtcacaaacagctgggcttgaatgtcttacaactaaatcctcctcccctccccgaggggcttggaattctccaagggcaagcatctccattatctgagttccatcatttgccacacaacaaccctaaagtgactgatatggtttggctgtgtccccacccaaatctcatcttgaattgtaactcccacaattcccatgtatcatgggaggaacctggtgggaggtgactgaattatgggggtgggtctttcctgcactgttccttgtgatagagaatgagtcttatgagagctgatggttttaaaaaggggggtgtccctgcacaagctcttatctcttgtctgctgctattcaagatgtgcctttcaccttctgccatgactgtgagacctccccagccatgtggaactgtgagtccaataaacctctttcttttgtaaactgttcagtctctggtatgtcttcatcaggagcatgaaaacggactaacacagccaccatcactaagccctcatgatggggcacatgccatacacaccatgtgcttcaggcatataaacacatttaatcctcacagccaccctttcctgccctcgttcaatagctgttttattgagtgcctatgatgtgccagacctggtgtgttgggtggtgggaaaataagactgattaggtctctgcatgcagggagatttacagtctagtaaactagaaattgagcaactaatttggagctcacaggccaaactgaaacttcagattcttttttaaggctttcaaaatcaatcaggcgggcagggccttccccatgtcattgtcctctggccaaagaccaatagggacacccctgtcactgaataagtttattactcattgcaataaggaaaacctcagagggtgccagaaataacttattttattttaggtttgggctcatgttagatgcttttggaggagttcaagaaaacctccatcagaggcaccagcaagtggggctaattctatgatttgttattttaaaaaatattatcaagagggaaagaaggctagacagagcaagactcaaactttaataggcaaagaagtaatgtcactcagattaacagaggggaggaggatgtctggtattttgtggcttggacagtgttcccattttgtctgggctcacacatgatgacagatgtggtattgtttttgtcttgcccaccacggtcagagtggccttgtctgatgttggtgttttatgaaactgtgaacaactgtgtatgttcaacagtagaacagcatggcctacctgtgggccagcccagttcctagcaacaccaagacccagctaatcatggctgctggctgtcaggggctgctttcctctttctctgctagttggccacaggccctctccctctctatcgtaatatgtgctgctgcaaacgccacccttggaatcgcattggaattcacttctctaattgacttcttaatttaattcacttctctagttcactgcccttggaattgcattggaattcacttctctaattaaagactaattagttacaattgtgatacatgctagcggagaaaacagaaacctaattgtgggagtagggagaaggggaaatcagagctggcttctaggtggaggtgacttttaacctgggacttaaagagtaggaattaaccagaaatggcaaaaaaaaaaaaaaaaaaaaaatcaatcttggtcaagtgatcaattcaatgaatattgactgagggcttgctatgagctctgtgctaacaatccatgggctgttttgtttactttcacagccccctgattatgtaatgagagctaacagtgacagctcgaaatggcttccatgtaggagcccactgaagcctggctggaaccatcagagatgagttctatcatcactttcattttactattgtggaaatggaaacacagtgtaagtaacctgcccaaggtcacatggtcagcaagtggtacagccaggatatgaacccaagcagtctgtctcaggaccccagactcttcattaccaaaccctgtcccctgtttatttttttatttttatttatttttgagatggactctcgctctgtcgcccaggctggaatgcaatggcacgatctccactcactgcagtctctgctcactgcaacctccacctcccaggttcaagcgattctcctgcctcagcctcccgagtacctgggattacaggcacctgccaccatgcccggctaatttttgtatttttagtagagatgggggtttcaccacattggccaggctggtctcgaactcctgaccttgtgatccacccacttcagcctcccaaagtgttgggattacaggcacgagccaccacacccagccccctctctgtttatttttatcctcactttgaaatgaatgtaatgtaatttgccatggtcatggggttcctgaggccttacgcagccaagattcaaactcagggacctgactccaaagcccggtgatttgaagccatgaacttagaaaatgcacatgggatatatttccatgagcatccacatgtaattttacagctcccatatgaaagtccttaagtcacatgccagacaacgggcagctttcaaagctagtaggcagataataaattttactttaaacccaagtattatcaggcagaggagacataggagaagagcgagaaacggtttggcttaagcaaggacaaacaagtctggaaaatgtccagatgaggatatctgcagaaatccaccatttggggggttggactgtggtcttgagcagtgaataattctccaacctggctgagatccggaatcccccaggagcttgttaaaaatacagatacctgagcctcggctccagacattcagattcaggaggtggagcccgggcaccggtatccttaacaagctcccaggggatcttggtccataggcaggtctgggaactgccagtcaatggaaacttgaagcacaataggaggaattgcacccagaaaaccaatctaataagtgtaaaaaagaaaagaaagcagaattctgcttgtttagttggcacagaggcaggaaccatcaggaggagcagctgagtcagacggagacaacgcaagctgcagatctcaccatcctttcgccacctgtttattagactctacattaataaaagcgatcgctcattgaacccaatttctccatctcaggccctttatgtggattatcgcagaattctcacaataacgcaatgatgattaggtattataacctctttttacagatggggactgtttagtgagagggagagtaaatgatttgctcacagcctagggctgttaggtggtggattgggatgcgagtccagcagtctatctctgagcttgtggctcccttcagcactgtgcaggggagggctctgtgtgccaggcacaaacaggactccaggactggcctgagcattcaggacagtcaacaaaactccggcatggcaagatccaatggtcgcagggccgtgtaaatgctaagaggagggtgaacttctttgaacaaagaaatagaagtgctgggtgcagtggctcatgcctgtaatcccagcactttgggagcccaagatgggaggatcatttcagcccaggagttcaagaccagcctgtgcaacatagcaaaaccctatctctataaataatttaaaaattggctggatatggtggcgcaggcctgtagtcccagctacttgggaggctgaggtgggaggattgcttgagcacagaagatcaaggctgcagtgagccatgactgcactactgaactccagcctgagcaacagagcaagactctgtctcaaaaaacaaaacaaagaaacaagcaaaaaaactaggaggacaaaaaagggagccgctatttggttgtgaggtcagctttactgatgcatatgagatgtgagcagtgttcacacccaagaaataataagtgccttggtgctgggatccagtggtgaacaggagaggggcttacaggtcagtgatggagatacaccttaaagtcattcctctattaatcatttaaatatgggacatgacctgatctgggaaaagagtgagacgtgcagggaaggggtctttgagaaaatgcctttaagtccagctctgacataagaattaaggcagttccaggcagaaggaacaatgcaggcaaggtctgagcctggaggaaatgtggctcattccagaaacagaaaggagttcatcatggctgctgcaatatagaggggagagaaggggattgtccccaggaagaatgcagacccttttttgtgaagattgtcatgaaacttaaggccttgaggttgagttggcatcagccaggccaaggtgggaaaggtatttcaggcaaaggaaaaagcatccacgaaggctcagagcccagaaagaagcaatggccccaagtaaaaagtgtgggcctggaagcctcccacacgcagggcatccatttttatatggctcccatccactgtgagaggttctgggattttggttttcgaggacaagaaaggaaacactgtcctcatgaagaagaccactacgataaggggcaaaacacatgtcccaggactgtcctgaagttccgatgggaccttggccatgtcccttccccaaaggcaactttgcttggtcctggtgcaaaataattaggtcctaccaggcccacttttaagggttttctggttttcaccttttcttggtgacttcctttaagatgggaatgaagataaactcaggagacagtgggaagatctcaacatacttttgttaaggtttgtgaggggatcagttttattgtatttcaaaatgtctactgtttaaaaaactcagtagaaacattattttggatgcattaagaaaaaaacccacaaaactttgcttattgccaaaaaaattcaaacatcaccctagtagatacctcataaggggaaagttggtttcctttttattttttgaaatggaatctcactcactctgttgcccagtggggagtgcagtggcactctcactgcagcctctgcctcctgggtttaagagattctcgtgccttggcctccaaagtagcacggactataggcgagtgacaccatgcctggccaatttttgtatttttactagagatgagtttcaccatgttggccaggctggtcttgaaatcctgacctcaagtgatccgcctcggtctcccaaagtgctgggactacaggtgtgagccactgcgcctggccctgacgtctgatgctcctcactcttcagctccagactattgggtaaacattctctgagaataagctagaagaaacttatggactcagtcaggctcagagatgtattgtttggcaacaaagttttatatttggaaaatttcacattttcagcttctctgaaaaactgaaatatctaactggctggatccaaagaacagctgcacttttggatgaggcatgtgtgatttctctacttcaccacagtccccaccactctctaacacctcccccaaagataacttctctcatttacattaccgccccatccctgttctagaaacttccctggaatataagaccatataatatgtaggcatatgtattttttttatacttaccttgagaatctttctgtgactacacacagatccaactttcctcctttccaaagctaagtcatattccattgttggaatctttgatatttatttgtttaaatccctcttttttattttatttaagaaacagggtctcatttgtcacccaggctggagtgcagtggtacgatcatagctcactgcagcctcaaactcctgggctcaggcgagcctcctgccttagcctcctgagcagctaggactacaagtgtgtgctatcacgcctggctaatttttaaaatttaatgtagaggtggggtcttgctatgttgacgaggctggtcttgaactcctggcctcaagtgatcctccagccttgccctcacaaagggctgggattacaggtgtgagccactgcacctggccatacctaactctctcttgacgtatacatacaaaggctccactttctctatagtacatgctgtaaatgaatatccttgtacatttgtttatgaagttttttatttttatttttttgagacagagtctcactctgttgcccaggctggagtgcagtggcacgatctcagctcactgcaacctctgcctcccaggtccaagcaattctcctgccttagccttccgagtagctgggattacaggcacgtgacaccacgctgggctagttttcgtatttttcatagagaaggtgttttgccatattggcaaggctggtcatgaactcctcacttcaggtgatccacccgcctcggcctccgaaagtgctgggattacaggcatgagccaccgtgcctggcctgttcatgaagttttatagaatgaatacctagctgtagacttattggataaatgtctttatgtatattttaaaactaagaaattttaaatttaagatttgaaagctatcacaaaattgccctggttataagaatttatatccccagaaaatgaaatcagtgtccttcctcaagccttgttttgatttacatttttgtaattactaaggtgaccaaacctcccctgtaaatcatccactgacctttccactttgcacttttttttttttttttttgagacgaagtctggctcttgtccccaaggctggagtgcgatggcacgatctcggctcaatgcaacctctgcctcctgggttcaagcgattctcctgccttggtcccccgagtagctgggattacaggcgcctgccaccacgcccggctaatttttgtatttttagtagagacagggttttaccatgttgaccaggctggtgtagaactcctgacctcaggtgatccacccgccttagcctcccaaagtgctgggattacaggcatgagccaccgtgtccaggctccactttgcactttttatctccttttactggttttagcagttctttgtataagagggatttaggccttaatcatatatgccacaaatttttccccaagttgattgtctttagattttgcattttacttcggaaaaagtaaaacttcatttgcaatcacatatatgattctttttcttggagggggtggtccacaacctgcctcctttggtaggcatattaatatattttttagaatcaaatgcctttagctaaggaatacattctctgtttccctacaggatccagtactatcccataaatgggctacttcataattttaaagttatcttcctgccccttaagacaggggtataactgtgtgtgtaggtgtttgtgggtacatttcctccagaacttttatggttttcttatgcacatttaaatttttgacccatctgtaatttatttttggtggaatgagtgtacacaacagagaacagggatgttttcctgatcagcagcacaagggggaggagataccaatgccagtttatagattttttttttttaacaacaacatgctttttggccctttacacaagtaatgcaaactcaaggattgtacccatacttccaccacccaaaacaaccacttttttttttattgcaacgtattttctgccagccttttttttttcctatagtatatagatttttgtttcagaaatctcttttttgtctgttttttttgtaacgtgacaacatttataactgctaacagttaatgttttaacctagcagctcccaaacctggctgggcagctggcttcctggtggagcttgttaaaaataatgaatcagcaaccctagggggtgggctctgggaatctatatttttaacaagttccatggacgtgtttgagacacagccaggccaattctggccgactcccccatgctccagctgtacctgtgattgtctgggtctccgaggtgatggttctggtggtggtctgagtctgggtggcaggcactgtttcctccgatacaaactggaccgtgctgggggctgctgcggatgtgcctgtcagctggcagccactttgcttgtgagctacaaaggcatccaggttgttaaactgctgcttgcagatgccgcagatatggatgtcgggagtcagctccaccagcaccgttgtgccacctggaactccatgggacaaagggaaagtaacggattaattccaaacagctttgaattgtaatgcagaccagattcatggtaggaagaaaaggcatggtggcagacatggctgggtagtggcccagtatccactccaccttcctcttcctgcgaactgcatcctaattgtgccctagcagcaaggtatcatatttccacacagagatttcttgccttagttaaacttggggaaaattggacataatgtaaatatcttagaaatcttcagaaaattggccaggcgcggtggctcatgcctgtaatcctggcactttgggaggctgaggcgggcggatcacctgaggtcaggagttcgagaccagcctggccaacatggtgaaatcccgtctctactaaaaatacaaaaattagctgggcatggtggtgtgtgcctataatcctagctactcaggaggctgaggcaggagaatcacttgaacccagcaggcagaggttgcagtgagctgagatcacaccattgcactccagcctgggggacaagagtgaaactctgtctcaaaaaaaaaataattttttttttcagaaaattatgatgcataattttatccaaccacatatgcacaaaggtagtcttgtattatttaacttggggaaaattggaaataatgtatagcaaccatccatgtgatggttcacgctgcattgttacccatggggcactagtggcattgtttgcaagaaagttcttttatcaaagataaaagggatgtcctgcactttgcagaaccagcagccacctcctatcccaactaaaaggtaattgtgaaaactgatcctcccgcacatttccaaacatactcacccaaaacacatactatgagaaccaatagtctaaataatcttggtcctctacatacttgtgaacttctccagcacacagctggaggagtttctgggaaaagtttggcatttgtgatgaaaagggagcagatgtggctagcaatgtgccccttttcttctggctttggatgcaaatgtgatggtggggcttctgcagccatcttgtaactatgagaaaaatgccaagatccctatgggctctgccctttacttcactgatttccctgattcaacactgcaatcaatcaattccagatttcattaggccagtataatttgggtttctgctacttgtagccaaaattcattcctaactggcagggacattatttctttttctttcttttttttttttttttttttttttgagacagagtcttgctctgtcacccaggttggagtgcagtggtgcgatctcggctcactgcaagctctgcctcccgggttcacgccattctcctgccccagcctcccaagtagctgggactacaggcacccgccactacgctcgactaattttttgtatttttagtagagatgaggtctcacctgttagccaggatggtctcgatctcctgacctcgtgatctgcccgcctcagcctcccaaatccctccctgggattacaggagtgagccaccgcacccggccgacattatttcttgatactaatcatatcaagaattaatactatattaatacctggaaagcacttagtgtagtatttggcactgtattagaagctactatataaatacttgttcaataaagacatagcgggtagatcatgaggtcaggagagcgagaccatcctggctaacatggtgaaaccccatctctactaaaaataaacaaaaaaaattagcccggcgtggtggcacacacctgtaatcccagctactagagaggctgaggcaagagaattgcttgaacccggaaggcgcaggttgcagtgagctgagattgtgccactgcactccagcctgggcgacagagcgagactccgtctcacataaaaaaaaaaagataactcgtgtttataagaaaatttagaagaaacttataaagaaggggaaaatcactcaatatttccatctctgcctaccatgaatattataaaatatttttttccattcattttctttacacttaaaagttgcgtaagatggctcacgcctgtaacccagcactttgggaagccgagatgggtggatcacaacaagagatcaagactatcctggcgaacatggtgaaaccccgtctctactaaaaatacaaaaattagctgggtgtggtggcacgtgccagtaatcccagctactcagaaggctgaggcaggagaattgcttgaacctgggacgtggaggttgcagtgagccaagatcatgccactgaacttccagcctggtgacagcgagacttcatctcaaaaaaaaaaaaaattgcataagatcataatattgtaaatattcagatcatagtattgtaaaactaatccttttcctaatttttttcctttttttttttgagatggagttttgctcttgttgcccaggctggagtgcaagggcacgatctcagctcactgcaacctccgcctcctaggttcaagcgattctcctgcctcagcctccggagtatctgggattacaagcgccaccaccacgccaggctaattttgaatttttagtagaaatggggtttcttcatgttggtcaggctggtcttgaactcccgacctcatgtgatccgcccgcctcagcctcccaaagtgctaggattacaggcgtgagccaccgtgcctggccctttttcctaaacattgcataaacattgtgctatatcattaaaatctcttcatatatatatgattatttaatggcaatacattattccatggtgtccatgcgtcataatcttctcagcaacaataaggtatttacataatttccaatttttcccaagttaaatgatacaagactacctttgtgcatatatggttagataaaattatgcctcataattttctgaaaatttgtaagatatttacattatgtccaattttccccaggtctagctaagacaagaaatctctgttcagaaatacagtttggttgacttgctaaggagactgggctgagcactgtgataagccatcttgcagggatacacttaagcactttgcaatcaatggatggaaggaaggaaaccttttcttctctggcagatactgagatacccatggaactaacaaggaaacaaggaagtgagacatgaagtagcttgcattgctgacgattccttaatgatggaataggactgacacccagaatgaaaggattttcataacagataatgtcactggtatgtggaaagtgcaaaagtaacgacatagaccttcgttagaatcttgacactgtcgcttaacaacagtgactttaagcgtgggttttctcatctgaaaaatgggaggagaggtttctaatccatggtttttgtttgtttttaatttctccaagaaaaaacacgggcttgttatgagaattaaatgggatggtgctcgtaccagcacagtcccccctccccgccagtcccccagcatgttacctgctgggttcttactgaggtacactatttaaacatggacatatctgagccccacctaggagatactgagtcataacagggtggggtggggaggatggtgtttaggaaaatctgtgcttttcacagtaatgcaaggaatacaccgccaagtttgggacccagtgtctcccaaactgttaacagtagcagctaacaagctgggagcttactatgtgccagattttctgcaaacccctggtagatgggttctcaaacttcatgtgcttcagagttgcccaggcagctacgaaggacagcggatccccagccccacccccgagattgaatgggtggggcccagaaagctgttttaaaatacacgctctcgctcccaggtggctggttgcactcagtctctggaccacactttgggaaacaatgcaccgggagaaaccagggacttgaaaaacgctgatgtcctcctcggttaaataaaaactgaaccccaaacccaaataaagcgaccacggccccgttttccattcagatctccacccttaatgaggaaaaggctttgcaatgagccggcaggacctcgtgagacctggtgattcccccaatctccaggctctaattttgagccactgaggcagaagttttcccatcagtgttgccccgtttaccctagattcctccctttctcctgcccgccccaaactccgcctgatggggcgggaatgcccttagggggtggcgattgtctgaacggcgtgccctcccccactgttcccttccaaggggtctcgcaaggctggagagcgcccccggtcttgcgccaggtcgggtgcgcccccaccccaagcccactccggcgccccctgcacagcgcgcccgccgcggtccccgagacgcggctccgagccgtcaccccgatttcggggccccgggcctgctggctgcgtcgcagacgtgcttgggcccgggccccggagcgcgcactgggccccggagcgcgcactgctcccggaaaagcacttactttgcaccgagcccgcgaagctctcgccctcgctgctcgcgttcatggccgcagactgggaggtccccggccggccgggatgccaaagtgggggacgctgatctacatggtgcaaggacttttccttttatttttccacaccccccaccctgccttctcccaactctgcgaggcggggaggacggatgtaaagcaagctgcacttccgctgcctagagggcgctggccgggcccggcgccccaacctggctttgcagcagcggctccccggggaagcggcgggcgaatcccgaggcccaggcccgcggagccccccaacgcccccggggagctggatggccacgcgcgtcccggcgtgctgggcgaccgcgggtggcgagggatgcgcccctgcccgcactctgcgttctccgcggacgcgattggcctccccggctcggggcgccttttgcacctgcaaccccaggcgttgggcccccagcgcggccgtgcagcagcgctgctcccgggacgcctgggtggtttgcggggagacccacgtgcggctgccgttgcggggtgggtgcgcggggcgcggcgagctccggagaaacccaggttgggcgtgagcgctgggcaaatcagcaaagcgctgggcgggtcccttgccccgctagggagactgagaggaccgcgaagaggtggggtcgtagcgcggagggacccctgctccaggagctgccaactttatcgtgcatcgcagtcgcctgaaaggcttgttagaacacacgctgttgggcccaccctagcgtttctgcttcagtaggtctggggcgaggcgtgagaacgagcatttctaagttcccaggtgatgcccctagtgttggtcggcgtccacactctgaggacagtgacctctctgctctgtccctcatgtcttactactactgtctcccccgggctcctgcgtcagccctattgtctctctgccgaccctcccaagcctcagacctctcccagcctcgagggatttgcccatagagtctgtcctgcttctgaaggtcagcattcaaattcacactcagggaggccatgcttggcctaatctaatcattctaatattgcagccccctcctcctcccccaaccactccctgtctccttcctgtttttttctttttctttttcttttcttttcttttcttttcttttcttttcttttcttttcttttcttttcttttcttttctttctttctctctctctgcctctctctctttctccctttctttttttagagagggggtctttctctgtctctcaggctggaagagtggtcggatcctagctcattgcagcctccaactcctgggctcaagcaatcccccctacaggcgtgggccaccaccctggctcactttttaatttttatttttgtagagatgttgcccaggctggtctcgaattcctggcctcaagcgatcctccatcagcctcccaaagtgctggggttacaggtgtaagccaccatgcctggcctgctttgtccttaaaaggtgttagatggaacatattatgtatctcgagtatatctgcttagatataatttagttgtatattatctgtgttctcctcccccttattttcagtaagtccctgtaaaaatggggattaaaaaaatctctttgcttcactgatgtagtccagtgacttggctggtgcctgacacatagtaggcttagtaaatatggcttgtataatgaatgggattttccctgctgctgcctctaaggcttggtttctgcctgcagcagctgtttattctcaagtgtttgtgaagtgccaggcactgggctagctgctggaggtagaccagggaggcagtcaacatgaaataatcaaatcagtactgtaaatatatatatatttaatatataatatttaatatatttaatatatatttatatttatgtatatatatattatatataaatatatacaatatatattatatataaaatattatatattatatattatatatttatatatataaaaaatatatataaaacttccttttttttttttaaccttaagttctgggatacatgtgcagaacgtgcaggtttgttacataagtatacatgtgccatggtggtttgctgcacctatcaacccatcacctaggttttaagccccacatgcattaggcatttgtcctaatgctctccctcccgttgccccccaccccctgacaggccctggtgtgtgatgttcccctcctgtgtccatgtgttctcaacattttgctagtgataagggctccaaagaccataaaatggggctgtaatagtggctgtagaactggtcatagcaggcctttccgagcaggtaatatctgaacaaggagccggggaggatgcagccatgtgaggatgaggggggagcaattccagcctgaggaactggtgggagcaaaaaccctggggcaggaatgagctagatgtaactggctgtggcctgccagtcccactgcagatcacaccactctcaccctgcattgcccaggcagctccaccaggctccttgctgttgttgctcctccctctgcctggattgctttcctggtctttgcaggactggctattttaggtcatccagcatcaaatgaaatgtcgccttcccagagagacctttcctatgtcttacctaaagtattcactctccctgcgactctgcgacatcaccttcatgatacctgtctagctaacatgacccagcagagcaccgcagcttacggcaatatttattttttattgcttgatgaatgtttacatatgtgcacacctgggaagtccccttccaagacacacatttccagccctggtcggctccctcatgcaccttcccagccaataatactattctggccaggcaaggtggttcatgtctgtaatcccagcactttgggaggccgaggtgggcggatcacctgaggtcaggagttctagaccagcctggccaatatagtgaaaccccattttcttcagtacaaaaattagccaggcttggtggcgcacacctgtaatcccagatactccagaggctgaagcaggaaaattgtttgaacccaggaggcggaggttgcaatgagctgagatggagccactgcactccagcctgggtgatggagcgagactgtctcaaaaaactataaataaataaaataatactattcctactatccaatcttgcagaggtcaccattctaacttttattgtcacgattccttttgttgagagcaatatatctcacatttgcctgaagagaagcatcatctggaaggctcactaaagaatgagttcttgggttccaagctatgcttactgcatcagaattttctggggtaagacttggtaatctgcaaatatctcaaaagtgccccaggtaattcttatcatgatgtaagtctgggccttactggtttggtggttaagtgtgtaggccctggagttaggctatgccactgccatgcaaatcctggagttgctgaactaggattagttgcttaaccttgaataggaaattcaactgctctgtgtcccggttttctgtagcttggagataatagtagcacctagttcattaagctgttttgtaggaggaaccaatcaatatctgtaaagtgcttagaatagtgcctgactcatataactcggcataaatcctagctattattatcttttaattatttttggttattatctgtctccctaccatgtaagctccaggagggcatagacctggcctattttatttacctgtatcctctggggcctagaacagagcctggcacacaggcatcctcagttcattttttattgtgaaatgatttcatgcatgtttccatgagctccattttaaccttttgctactatgtccagccaaccttctctattacacatcttgaccactgcaacagtctttttctggtctgaaaatgtcctattttcatttcttatttttctttctatacttttaaaaaatgttatttttcaacataagctccatcaagatcaacacactcttatttatttatttagagacagagtctcgctctgtcacccaggctggagtgcagtggtgcgatcttggctcactgcaacctccacttcccaggttcaagcgatcctcccacctcagcctcctgagtagctgggattaccggtgtgtgccaccacgcccagctaatttctttgtatttttggtagagacggggtttcatcatgttggccaggctggtctcaaactcctggcctcaagggatctgcctaccttggcctcccaaagtgctggaattacaggtgtgaaccactgcacttgccctatacttgtttttcttattgcaaaagtattagaaattgttggttagaatttgaaaaaaaaatacaggaaaacataagaaaataaaacccacttataattcactatgcagaaataacattttgattgatgaatttttgtgtgtgtgttgtatgtgtgcatacacacacatataaatcatattcatatattttataaaaatgtaattacagcttacatgtttttcacctccacatgaaatatacatggctatctgagatctcaccaaccagagatatatacttatatctttatgtactacatgtctatatctttataggctttttttctgtagaaatgtaatagaatgaaccatatgaattgctgatatatttattttttacttaaaaatggtaattttatatggttcaaaccaatatgtactcataacattaatattatacttctttcttttttttcttgagatgaagtctcactctgtcacccaggctggagtgcagtggttcaatctcagctcactgcaacctctacctcctgggttcatgagattcttctgcctcagctaggattacaggtgcctgccaccagcctgttttttgtttttagtagagttggggtttcaccatgttgcctaggctggtcttgaactcctgacctcaagtgatccgcctgcctcagcctcccaaagtgctgagattacaggcgtgagccaccactctcagccaatgtttgtatttctattagagacagggtttgttatgttggccaggctggtctcgaacacctgaccttgtgatccgcccgcctcggcctcctaaagtgctgggattacaggtgtgagccaccatgcctggcctcaaatttttttaataatacaattcctaatttatagctcagcacatggcctcctgaaaagagacttttcccagcttcctttgtagctacgcatggctatatgactaaattctgacaacgtaaatgaaatgtgatgcagcttctgggaaatatcctaaaatagcagttggcatatgctgtttgtcccttcttctttagctcttcctcttttccttgcttgggatgaggatatgatggctggagctccagctgccattttggactatgagaatgaggcgatactctaggtatggcagaatagagagctggaaggagcccaggcccctaacttctttgtggaacttccaactggattgcctatttccagacatcatatatgagaaatgcacttttttcagctattgttatttggggtgggggaatgtttctttcacatgcacctgaatcaaatcttattctaacacaatgctatgcaaactattccacaattggcttttgatcttgatttggtgggttgcattagaatcacccgagaaattattaaatatcctaacccctctccttcagaaggattgggatgaggcctgggtatctgtatgcttgacagactttttgggttgttcaatcagcacttggtgcttgcaaacctctgctccctaccattttttaatggtcacataatatttcattatagggttgcatcataatttatttgctatgttactggatgtttgttaatgatttttttttttttttgagacggagtcttacgctgtcacccaggctacagtgcagcggcgtgatcttagctcactgaaacctctgcctcccaggttcaaacaattctcctgcctcagcctcccaagtagctgggactacaggcatgtgccaccacgctccgctaattttttatatttttagcaaagatggggtttcaccatgttggccaggctggtctcgaactcctgaccttgtgatctgcccacctcggcctcccaaagtactgagattacaggcgtcagccacagccctgctgttaatgattttttagatatcataagtaatacaccatagtagcttttttaattggcccgtgcgaacacattatttctctatgccagccatcctgaagagctgccagaataacttgtttcaacaccatgtggaagggctttttcttccttttttcagattatttatttcaatgtggattctatccagatctatttctcagtaagaatcacagttcttgaaaagttaacagcctttgtttgactagaaagctcacgatttcttctgttctcaagtttttgaccacttctcatttaatagataaaatataatatagaaatggcaaatgtcttgcagggtgcagacatactggtaatcctactccatgttctaaatctggcaactaaaataaacttgaatttgttaccagtgcttaaaagttgatgtatttctcataagaattgggatttatagctttttgcaaaaatggaaggatctggcaaatctgggcctggactgtcaaatggtaacccttggctgggccggagaagctcctgtggatgaagcccagcctctctgatttaccccagtccccactcctccctgttattcttgataacaaggctgagaatcagtttccatcattcgttgcctctgtgagccatgttgaatttaaccaaaatttgtaacatgtttctgatagaaaaaaagaacttctccgtctccatggtttcaatgtttctgttaactaaaaggcttcactaagttacttacattacctccactatgtccaaataaataaaataaaaaaataaaaaagcctattttataacaaagtgttggatacctattttataacaaagtgttggatgcctgatgtaatttattattcttgactgtcagaacaacagtcaagaggtagacactattatcactatttcatagatgcagaaactgagtctcataaagcctaaataaattttcttcaggcaaaagaccaataaaagtacgttagttaagaatctttggtcaggcatggtggttcatgcctgtaatcccagcacttcgagaagcaggcgaggagttcaagacgagcctgtgcaacatggcaagaccctgtctctacaaaaaatatcaaaattagctgggcgtggtggcatgcacctgtagtccctgctacacaagaggctgagatgggaggattcctttagcccagaaggttgaggctgcagtgagctgtgatggcaccactgcactccagcctggatgacagagcaagaccctgtctctaaatttaaataaataaataaataaataaataaataagaatcactgatggcaagtaacagaaactgtagaacagattttcacagtattttaaaatcaatctattagaattattcacttgcttaaattatttctggcaagagatattcagatactttcttaaagtattaagagaacacgcaggtttttttggaggggggggtctggtaatgttgataacaagaataatgaggacatattaactgaattaattactgtaagttttcgagcaaatatatccttctcctaacaatatacagatgctgttcagcatatgtatgatttgctacatcctgataaactcattgtaagctggaaatgttgtaagttgaaaattcatttaatagacctaacctaccaaatgccctatcttagtctagcctaaattaaacatgcccagaacacttacattcgcctgtggttgggcaaaatcatctacaaaagcctattttggccaagtgtggtggctcatgcctataatctcagtattttgggaggctgaagcaggtggatcacctgaggtcaggagtttgagaccatcctggccagcatggtgaaaccccatctctactaaaaatatgaaagattagctgagcgtggtggcacacacctgtagtcctagctactcaggaggctgaggcacaagaatcacttgaacccggaaggcagaggttgcagtgagccgagatcgtgccactgcactccagcctgagcgacagagtgagactccacctcaaaaataaatacatacatacatccatacatacataaaataaaaaagcctattttataacaaagggttggatgcctcaggtaatttatttgatactgtactgaaagtgaaaaacagaatggctcactggtgctgcccagcagcatgagagagtatcacactgaatatcgctatcccaggaaaatataaaaaatcaaaatggaaagtatgggtttctactgaatgggtatcactttcacacccattgtaaagttgaacaatcatcaactgtactattttacattaggaatcgtctgtagtttttaatttcaagtgaccaaaattttttcaacagtattttaacatacatagtttcctatagtaatcattcatagttagtaaaatgtcaattctcaaggcaggaaattttattttcttctttgtgtaccagcacctataacaatgcatggtatttagaaaaggttggacggatatgttgacgaatgaatgaatgtgccttttgtcaagatggcttcagaatataactattaaagcaaacatttaactattacaggaaaacatttttttcctttttagtaaacacacggagaaaaatgtgacctaataacagaatacagcaaattatagattccatttagactttatgataactggtatttttaaacctcctttatttttctagacaagggctaacaacaatgggtatcctggggcttggcattttcaaaagtacttatgtcgacaacctctccacttagaaagtactacagaaaattgtggctaaggtttcaatgataaatttatcgaaggctggtggtctggtccagaggctgttgctctgtgattcttcccttgattctgctatttgtcagggacgctgacccttgtttcttgtatccagggttctgggggcttctagcttcctgtagggtttggctgaggggtggaagggagaaggcagagtatttctcctcttccccgtctatcttggtggcagtggctgtgtctcctccatggccctagatcctataggatgggcccactgtggcctcaccttctgccgggtgactgtggtccctgaaaacaccacctcctccctttgtctctctccctgccaccttccctggagagaaaaggcagtggcttccaggtgttgctaatctctgggttgcctaaccattcccatttggtttctcagctcttgcatcacttggatatcaaattccctgtgttacatttactgaaattgttagatttgcttctctttctctggttggtccctgactgacatagctgtattaaagtttgcaaggattatacttttgttcttgcttttctggacacaccacgggtgattcttacctggagtgtgcctcagattttaagggaacttgttgaggacacatatgcttgggcaccatctagggggcctgggacagaatcttggggcctctggtccagacatgcacagcatggagagatgcctcaggtgactccagcgagctcctcctgatgtcactgtcactgaatcctgatcccaaatattggaaggggactaagggaaatttctcttccaaaaattgattcactaacaatatttagcaactgcctgcaatcctttatgtaaacataaaagacaatgaagaaacccttgaaatttaacttaagtgctaaactctctgtaatgagatatgatccagactaaacctgctgggcattaagtggtagttacacaatcaatcattttgatgagagctggctttgagtcttgcctggcacataactgagtgtgcacacctgtgttttaataatatacttgcttggataatttcacacaagcaagcatgcacaggcctgatttttttgttgttctttcatatagttaatgcatcaacgcagaaattctcaaacagcacgaaagggtatatagtgaaaagtggatgtctcttcaaccttccccagccccctaatttctttctttttcttttcttttttttttttgagacggagtctcgctctgtcgcccaggctggagtgtggtggcatgatctcagctcactgcaagctctgcctcccgggttcacgccattctcctgcttcagcctcccaagtagctggggctacaggcgctcaccaccacgcccggctaatttttttttgtatttttaatagagacggagtttcaccgtgttagccaggatggtcttgatctcctgacctcgtgatctgcccgcctcctcctcccaaagtgctgggattacaggcgtgagccaccgcgcccggcccctaatttctttcagaaagcaacattgttaccagtttcttggttgttcttcagaactttctgacatatatacaaaaagacatacacatattcatcgcccctagtttttaaaaaaaacaaacaaattatactctaatgcaaatagcattctataccctgcttttttgcacaacaatgtatcttgaaaaatattgcttatcagtgcatccagatttgcctcattgctttaggaaaaattcagtttttcactgtacatgtgaaaatatacgtatatatgtatacatatatacgtatattatacatgtaatatatacatatatgtatatatagtacatgtacacatatactaaaatttaagcaactcattaatggacactttgtttctagtttttgattactataaacacagctgtaatgaatatctatatttgtatctgtacatgaaagagtctatctgtagactaacttgctaaaatagaattgctaggtcaaaggtgcatttaacattttgacactttcaatggggttgtactgcgtagaactcctaccaagatcttatgagagcacctgtttcctacagcctcactcacacaaagtgctatccagcctctgattttttttatcaatctgatgggtaaaatatggttttccatagggttaatttgcatatctgaatttaaataaacaaaatcacatacttaacacccacctccaacaaattactaacaatttgtaattattgactcagaagaggtgcaagtaccatgcagatatggcaaaggggacactttgttacaaagtttgaatgccaaagagcacatctgaaagtttaagtgaacttgttgggagcccccatgtgttagaagttagaatgtaacacttgtgggtatgagtttacaattgtattgatacaattgtgtttgattttcattaaaatgtcctaagaaggattttagtaagggtcacactggctaccaagaatcaatagtcccctaaatagaaaggctcaaagtcacagaaacgtatttctcattctcaacagtctgagctaggtgttaccgtcagtaggaggttctccttcaaaggcccggacctttcaaatggttttaattacaggttaaagatgaaattcaaatcagacctttgctgaactgttgaaacacctcctgatactgtggtttgaaaaccactaatctaattctcattttacagaggggaaacagaggccctttccttcttacaggagtccaaagctattgatagaaatttttaaaattttgtttaaaaatgtttgagtacttttaaaaaatatcttttcattttgaaatagttttaagactcacaagaagttgcaaatatagtttagttttctcatatacccttcacccagcacgctccaatgaaaacattggattcttttagggtttagggttggaaaaaatcttgaaatgatgattagttttaaatgctcattattcatgcaaacgcttagcctattcagaaagtatctgatactttctttttttgagatggagttttttgctcttgttgcccaggctggagtgcaatggtgcgatctcggctcgctgcaacctccgcctcatgggttcaagccattctcctgcctcagcctcccgagtagctgggattataggcgcccgccaccatgcccggttaatttttgtatttttagtagagatggggtttcaccatgttggccaggctggtcttgatctcctgacctcctgatccgcccacctcggccttccaaagcgttggaattacaggcatgagccactgcccctggccttatctgatactttctgatacaacgtatctgatacaaatagtatcagatatcaaatactttcagataagtatttgatacaattgtgtttgattttcattaagatgtcctaagaaggattttagtaagggccacactggctactaaaaatcaatagtccccgaagtagaaaggctcaaaatcatagaaacgtatttctcattctcaacagtctgagagagatgttaccgtcagtaggaggttctccatcaaaggcccggaccccttctgtcttatggctctgtcatcccttggggcttggcttggagaaggccactcacttcctacaggctttgtctgccacacatctatttcctgcttaagtgccattggcagaatccagtcacatggtccatcatggaagcaggtgggcagggctgggaaatgtagcctctggatgggaagcagcttctcagctacaaaactacgctaaaggtgtggcaaattttgatagataattgtctctgccacagaaagggttttctacttttgcacatatagagatcggtggagctaggttttaattcagagaattgttatttagctgactctagtggacttttctctctctctctctctctctctctctctctctctctctctctctctcctttcttttttttagacagagtcttgctctgttgcccaggctggagtgcagtgttgtgattttggctcactgcaacctctgcctcctgagttcaagtgattctcatgcttcagcctcccaggtagctggaattacaggcatccgctaccatgcctagctaatttttgtatttttagtacagactgggttttaccatgttggccaggctggtcttgaactcctgagctcaagtgatccatctgccttggcctcccaaagtgctgggattacaggtgtgagccaccacatccagcctctcgtggactttttttttgtttttttttatttcgtcagtctggcatccccttcctacttctgataacaggatttttgttctatgatttcctttgggggaaatagtttcccactatttcacataatattaatcacaatctcccatcacaggggtcacaaatgtgatcatgtcacccagacatagccattatctcctattgtactgaattattttgaagctcctcccagcttctgtaccatgtagtttgtgctatttctcatctgaaattctgtttcccatttgatttcctgggatcatgtctactgcttccatttgagctgaagaactgccttatatggaacctctttgaggatcgcctagactgatttgggatcccctccctagatccctaagtgtggctacattccagcactcaccacagtgtatcgtattggttgatttgttggtctgtacttaccacagtgtattgtattggttgatctgttggtctgtttcagttaagacacctttggcagcaagcatcttacctgaaacttttcttgggtatgcctcaagatgcatatgccatcagtccttccagtagctggagaggactgggtttattggagctcttagactggttacattggtcaggactagtttttggctggggctgtgcccagcctcagtgtaaactatacatgacaatctcatttcctttggccagtgattgggctcccagtgggccaagttctgctcaataagacatagaggaaatctcctgatggcttttgagaatgattttccttcctggaaagaaagaggcatgtgagaagaaagcccttgcctgccctcctccccacctccatcctttctggtctggtcattgccatggtagacctggtttccaaggcggcagcagccatgtggtagacatcctccgcaggacttgggaggaagctgggacgctgaggtcggtggagtagaaggatgaaaagaaactgggttcttgctgacagtgctgagccactgaattcactctaggaccacctaccttctgatttttcattaaatattgtaataaatggccttagaatttaagacagttctccccaaacttattcccactgggacacataattaaaatgataacaattgtatagcacactggggtaaatggcagaaaatttgggactttgatatggacattgttcacagaaattaatcatacttctgtatgttgttttcttaaaatataaaaaatacaaaaaataaaataggaagttttagaaagaagtaatgcatttttacaaaaacatttttttttttaattttacatgagaaacttgaatttgctttcatggatagaactttcctgtgtcagattttatgcttaaagcaactacatgcaatttctgttcaggcctttttaatgatgacctggccacatatttgatgggcattatctacgaaaagctttattagtacaaagaagctacataaaaatataaaactttttattttttttatttttttgagacaggttctttttttttttttttttttttgagatggagtttcactcttgttgcccaggctggagtacagtggtgcaatcttggctcactgcaacctccacttcctgggttcaagcaattctcctgcctcagcctcccgagtagctgggattacaggcacccaccaccacatctggctaattttttgtatttttagtagagatggggtttcatcatgttggccaggctggtctcgaactcctgacctcagatcatccacctgtctcagcctcccaaagtgtaaggattacaggtgtgagccaccatgcccggccgagacaggttcttgatgtgttacccaggctagagtacagtagtgccaccattgcttactgtagctttgaatccttgggctcaagcaatcctcccaccttggccttctaagtagctgggattacagatgtatgccaccatgcctggctaatttttaattttttttttttaatagaggtagtatcttgcccaggctggactcaaacttctggactgaagtgatcctctcatcctggcctctcaaagtgctgggattacaggcatgagtctttgcacctcgccaaaactaatttttgaaacatattttcagaaactcccaatgctaacattttatttaaaggctttacaagcaagcatcttcttttctttctttgacaaatgttggtatttgggatttcttgtgataatgcagatggcttgcgagtccagtgaaatttttatagatggaatactagctatttcacaatagtgtaaagtgcccactggcagaacacacaagcctggttagatcaattccctgctgctagcttggattcactaaaagggcacagatgagaaagtacagaagtaactaggttatataaagacataaatcagaacaactacctggtaatgaactcagcgggagttctggccagacctccaaccaatgccgtgttagcttggacctcatgttccttggcatttggaacacaaatccccccagcagttccattgccccttaggcactgtacacagcagcaagccttgcaactggccactaaggcagatgtctggctggtggaacaccttttgaccacattgcatgcatcaagcactgtcagcactgttcagtggaggacctaattgaagactggtactgctttttggcatggaaggtccatacctattgtatttgtcaggatgcatctggttgctaatggaaaaaacccaaatttgaactggctttaaacaaaggagggaacatgactttagcttcagagatggcttctgggaatacatcatcagggatggctctctctctttcttagccatgatttagaaaaaaaaaaattgtttttgcttcatcatgtgaaattaaaacttttttctttttgagatagtcttgctctgtcacccaggctggagtccagtgttgcgatcttggttcactgcaacctctgtctcctgggttcaagccattttcctgtcttagcctcccgagtagctgggattacaagcgcccaccgccgcagctggctaatttttgtatttttaatagggacggggtttcaccatgttggccaggctggtctcgaactcctgacctcgagtgatccacccacctcggcctcccaaagtgctgggattacaggcgtgagccactgcgcccagcctagtttcaacttttatctacattataaaggcacatagtttaaagagttaaatactctaccaggcttgttatgaaaaagatcttctcatccctatttcccaggcctcaaaggaattatggtgtaattatgtttagacaaatattcaatgtttacattatgtaaatagtagtcacagctgagccatagtacattctgattacttttccttttctgcacaactttttgttttcattagagttaaaaaaaattattttctgtttgtttggttacttttctatgcactaaatcatctgaattattcaccactggttgtgtaaatttcctctcaatgtactcaaacacattacaatctctatcaatttggtctttctgaagaggattcttcaatctggattggggcagctgagcagtggttgtcttaggatattttcttcatggttatcctggaatttcttacatttcttcctaatgagagatcctctggttttatagactttatgtgttcactttttcagttttttaccttttttttggtgtattagacttctgtgacaatgtacaagtgaggtacattttaagatttaacacgtatattttcatactttattgataatttgcttttaaaattctttgctagttagaatattactcagtggtgaaaagaagcaaactattgatacatgtaaaaacttggatgaatctcgaagacattacattgataagaagagccagtttcaaaaggttacatactgtgtgattccatttatatgaggttctctaaaagacaaaacaatggtgatggagaagagatcagtagttgtcagggtttaagggtgaagggagggtctcactacaaatggaccacaggagttttttggggtgatggaaatgttctgtattctgatcttggtggtggttatgatacggctctgatgagtgcaggaacaccagggctcttgtctcacgcgaattggataaaacgacacagacacacgtgaagtggttttaaggaacggagagtttaacaggcaagaaaaaagggagaagaaagaaggaggaagctcccctgtacagagacagagggaggggggctccaaagccaagagaggagatcccaagtgtggcagataccagccagttataggaggaggctggaggagatggagtctgatttgcatagggctcaggggattggtttgaccaggcatgtcattatgtggcccacgaaaaaactggccctcccaccctagtcttttaatatgcaaatgaaggtcgtcatgatgttctatacatgttgggatatgtgggggtggccaagttgccaggcacatgtagggcaagggcaagaggataactgtgggaattgccatgtttgggcggacccggtttctaatggcctgcatttgcatatcaaaggttgccaacctggctctaagagatggggctttcctgctatcagaaacgtttttggagctgctttaaaagaaacgaaaacttcccaaagaccccttttcctctctatctgcctaaaataatttcttaataactcctataacagttaaacaaatctatatatgttaaaaattgtagaactgtacactgaaaagtcattgcgtataagtttaaaaataaaacaaagaattatgcattataaaggtacagttgattcttacattctataaagtcatcacgaacactgaatttgtgaatactgaaccattgctcctaggggaagtataaggttaggttcttgtgaaccccaggtacaacatctgcatcagccaatcaatacataactttattttatgtgtgtttctaaagacaccttatttaatgtatagtgtgatccattatcattaaactcacagccaacagcactgtaatgcatgcctgaaggaagctcatctaacccactgatattctctgaggcacattgcagccttcttgcacttaggaacactagaccacacttcctttctaagcttggggggtgtttcaaacagtgaactcaccaacaaaaggcacgaaaatgcaaaagaagatgcagcacagcattaaatagactgtaaagaggacccttgcttgcagtacgggatgtggtccaagaatgcagagtgctgcctccttcaacctcagctgggactgtgtgcattgggcaagtcaaattttttcttgctctgtgcatgtccatgaaagcaccgggagcattgattttgagattgcaaactagttttagtgggtaatgcaaggcacttgtattggttcgaaccccgagcgcacgccaacagacaacacaaggcggtgtggagcaacacgctgttttaataagcgcccgagcgccggcgggctgaggcctaaaatggcgtcagcccgaaacggggacggggcaggggttttatagtctcctgttaacaggacgtgtctgacgtaactgctacgcttacccagacggcctctctcttggtcttcggcgggtacgtgtcttccggccagctctcttccgcttctgctgtcttgatgacgcacagtgctggcgcaagtcgtcttgcgccaggcgactgggtctgaggaggcaggagttattcattcccttaagctttcaggccggggggagaatctttcaggtaagcaaatttgcatatattgaactcacaagtaatgagaactgactgtaattgacccttagaaatttgaaggtagggccgggcacggtggcttgtacctgtaatcccagcagtttgggaggccgaggtgggaggatctcttgtgcccaggaattcaagaccagcctgggcaacatagtgaaacccgtttctacaaaaaaattaaaagattagccggtgtggtggggcgcacctttaatcccagctactcaggaggctgaggtgagtggatcgcttgagcctgggaggaggaggtggcagtgagccgagattacaccgttgcactccagcctggacaactgagtgaaacttggtctcaaaaaaaaaaaaaaaaaaaaaaaaagaaattcgaaggtattaccctgttgtccttgagtttctcatgttgctggtgatataactctgatgctattctgattgttacatctctcaatggaaacttcattattttcaccagcttatagctactttccttgctccttagtaatctaaaacttgatgatagtatttattggttggatctatttccacatattgcatgtgatactcacgcctaccatctaataaatcctgttctctgcgggttctgggacaatttattaacattttttctgcccttctggtttttttgttctctgtctggaactcctggtgtttggaataggaactcttgcactagtcctgtcatttttaaatttatcttttctccccgttttgcatgtcttggtctttctgctcaactttctggaatatttccttaactttatttttcaagctttctattaaatttttcatttctgctgtcatatttttaatttctcagaaccttttctaccatttgaatgaaaacaaattggcatcttattcttatttcgtgagtgtggtattttctcttacctctctgaggatgttaatgttttgagggaggaacctttttccttctcccagttttggtttcacccatgtggcctgtcttttttctgtttggttgttttggcctttggctctcaggtttgctcgaaggtcttgtgctccttggctgtctgatcttatttatttagttattattttttgagatgtagtctcactgttgcccaggctggagtgcagtggtgccatctcagctcactgcaacgtctgcctcccgggtttcagggaggttcctgcctcagcctcccgagtagatggaattacaggcacccaccatgcctgactaatgtttgcatttttagtagagacgggtttcactgtgttggccaggctggtctcgaactcctgacctcaggtggtctgcccacctcggcctcccagagtgctaggagtctgatcttattttagaaggaggtgctgaagagctgattgataattctgagaacgcagggtaggggtgggtggcttgtcaagcttaagtatcagtgcagggtgacctggctggggtgtgtcctacctgctccaaaatatcagtgtatttcgttttcctttttctgcactgggtgcatttctcagagcagaccggatcactctcctgcctagaggatacaatccctcctgccagtgcttttgggacatgctagggaaggaaggttgcagaggtctcagcaatccgtatataagcttccccccgtaccccctgcttagtccctgtacctgaagctccctgtccagagactctctcttttatcctctcaaaagaataaagtgcagtcatctgaacaggacagaggctgtcagatgcccgtggcatgggagaggaaacctgggatctaactctttctttgattttcaaacactctttctattttttgccccacttatgcctccaacctgcagagatatctggtgctactcattcctgaatgtttcaaggccctgcaggacacttgggttctttctctttttctttttttttttttgtttttcttttgcctttttcccactgacagcttgggattcagttttcctgagtctgctaatccagttatcacttgttcatctactttccagtgttaaaagctagttttttaaaaaaaggtaaaattgtaactctcaggaaaaaaaatgaacacacatgaaagattttattgaactcatgaatgaggaagctggtgaggtgttagaaccagctcaaaggagaacgcaaagagcagatcagaaatttgaaattcactgatcagaaatttgaaatgaatttgcaaacagaggagtatcagtttcctactgctgctgttacaaattgcttcaaatttagtggcttaaaatactaagtggctgtgaaccccaaatatctgagacaagtctcagtcaaattagaaagtttattttttgaaggttaaggacacacctgtgacacagcttcaggaggtcctgacgtcatgcacccaagggggttggggtacagcttgcttttgtacattttagcgagatgtgaaacatcaatcaatatgtgaaagattacattggttctgtctggtaaggtgggtcagctagaggtgggggcttccaggtcataagtagaaaagagacaaaaggttgcattcttttgagtccttgatcagccttccactaaatacacaatttagtctggctcattaaatctgcatttttacacaaacataaggcagaagaagcaatcatatatgcatttgtctctggtgagcctgagagggatgactgagttctgtctgtcctttgtccacaaggaatttccttgtgggcaaattgtgagggaggtatatagctttttatctttgtaactatcctatttaggaataaaatgggaggcaggtttgcctgacataattcccagcttgacttttcccttgtcttagtgattttggagtcccaagatttattttccattgcttctcagccttttggctaagatcgagatttattttcctttcctatggcttattagcttacagttctggtggtaaaaaaaatcctaaaaccaaagactgccttccttctggaggctctagagaagaatccatttccttgccttttccagcttctggaggccgcctgcattccctggcttgtggccccttccatcttcaaagccaacagcatcgcgtctgcaaatctctctgaccactgtttccattgtcacatcaactctgactctgacacaccagcttctcccttctagagacccctctgactacagtggacctacccagataacccaggatgatttctccatctcaagatcattaacttcttcacatttgcaaagtcctttttgccatgttaggtaacatactcacggtttctgtggatatgatgtgcagcgggtgggagcattattctatctaccatagaaggcaaactgatttttccacgaatgggtgtgggagcaggagataggcggagaattctatccctttcactggacagaatccatttgcaagtctacagacaagaattattttgcattgctagtagatctacagcttacagagttgtaaaagctcccataaaatcagaatgggattgtgtggagggtgtcttactgtcagtgggtagttttcctttgaaacatacatttcttgccatgccagatttcaccatttcattgcttttgctgcttctcccatttcctttaacctagtgagtttataccttaacaaaagactgtttctgatgtttagtggtattgggtaaaaaggaacagatcatcaatgcattcagcgtctagctttttcccagctctgctttcctttctgtgggctttgttctaggcagattgtctccgcatgaactttacacctaaagatcatgttatctgtattctaaattaaaaaataaaataaaaaacatttaaagatactacaattttaaaagacttttttttttttaatgaggctgagtctcactctgttgcccaggctggagtgcagtggcatgatcttagctcactgcaacctccacctccagggttcaaatgattcccctgcctcagcctcctgagtagctgggattacaggcatgcaccaccatgcccggttagcttttgtatttttcgtagagacggggtttcaccatgttggctaggctggtcttgaactcctgacctcaggtgatccgcctcagccccccaaagtgttgggattacaggtataagccactgcgcctggccttaaaaggctttaaacttggaaaagtgtataattgaacccctccccccgccgccccatagctgagctctatggaggaggtgagatccgcaggtcagggaaggaaggaaataagttagtggagatatatacacaccttcctctctggcactgtggttgaggtgaattggtttcctatttcccatctcccttcgttggaataatcccctctggccaagaggtccacctcctaattctgggaacctgtgaatatgttaccttacagggcaaaaggaactttgcagatgtgataaaaaggaggttcttgaaatggggagagtgtcctggaccatctagatgggtccaatgtaatcacaaaggcccttataagtaaaaaagggaggcaggagtgtcctaattgaagaaggagataagaggacaaggcagaagcagaggggctggggagagagaaacttgaggatgccgcactgctgaggaagggggccatgaaccaaggagtgcaggcagcccctagaacctggaaaagccaatgaaaccgattcccccagagcctccagaacgattccccccagagcctccagaaggaatgccacccagtgaacaccttggttttaggacttctgacctctggaactgtaaggtaacgagctacttagtgctttaagctattaaatttgtgataatttgttacagtaacagaaatacacacacacacacacacatacttatttgcacattcgtttcactattcctgatctgtggaggtgtctgttcctggattctcctctgaactggttctaacacctctagaatgaaccagccctgctaacaccagcccagtgagactgattttggacctctgacctccagggctgtaagatcataaatttgtgttgtgtcgatccactaaatttttttcccccatgtgatagtgttttttttttttttttttttttttttccgagatggaatcttgctctgtcacccaggctggagtgcagtggtgcaatctcagctggctgcaacctctgcctcctgggttcaagccattctcctgcctcggcctcccaagtagctgggactatgggcgcccacaaccacagctggctaatttttgtatttttagtgaagacagggtttcaccatgttggtcaggctggtcttgaactcctgacctcaagtgatccacccaccttggcctcccaaagtgctgggattacaggcatgagccactgctcccagccttaactttaattgcatatacaaactctactttatgtccccctcagtttatattctcaatttcacaaataaatctttttataatttgtatccattagcatagttttatagttatagttttttaatggttttatcttctaaattctataccacaattaaaactgactcacataccaccattacaggattacatgattctgtaattgtctatatatttacctttaccagtgagttttatattttcatgtgcttttgtgttgctgtctagccattcttccatttcagcttgaaaaactccctttagcaattcttacaaggtaggttactggtgatgaactctgtcagcttttatttatctgggaatatcttaatttctccctcacctttgaataacagtttacctggatacagtattctttttttttgagatggagtctggctttcttgctcaggctagagtgcattggcacgatcttggctcacggcagcctccgccttgcatgatcaagtgattctcctacctcagcttcctgagtagctgggattacaggtgtgtgccaccacacctggctaatttttgtatttttggtagagatggggtttcaccatcaggctgatctcaaactcctgacctcaagtgatctgcccaactcagcctcccaaagtgctgggattacaggcatgaaccaccgctcctggccctggatatagtattcttgattgacagtttttttcctttcagcactttggaaatactaccctactctgtcttggcctacagtgtttctgctgagaaatccattgataatcttatagaagctcctttgtacatgactaattatttttctcttgcttctttcgagggtctcttcttatctctaacttttgacgtcttcatcatgatacatctcagagtaggccttttgggttcatcctagttggaatcttctgagcttctggaatttggatacccatttccttcctcagatttggaaggttttagccattattttttcagataagctctgtgaatgcccctttctgtttctattctccttctgagactcctgcaataccaatattggtccacctaatggtgtctcataagttacttaggctttcttcacttttcttcattcttttttgttttgttcttctgacttgataatttaaaatgagcttcttgagtttgctggttctttctcctgcttggtcaaatctgccgttgacccctctagtgaattttcagattcagttattatattatgctgctccagaattgtttggttctttttaaaaatgctttttctgtccttgtggatattcttatgttgttgaggtgtcattttcttgatttcatttagttgtctagttctcgtgttgtgcactgagtctttttaagacaattattttgaattaattatcaagtcattcacagatcaatgctttttttttttttagagttggtttctggatatttcttttgtttcaatgattagaccacattaccttgtttcttcatgtgccttgttatttttctttgtgatttgtgcacttgaaaaaaagccaccactcccactctttatgaattggccacatgtagtgaaagaccttgaccgatcaacccagctgcctcacaaacttttctgggatgtgtcttttctaggcatgtgaatgcagtttaccagttagagaggtctgtgggtttctgtttcaatactttgtcttgctcagtctggtgtctgcctgtgatactgcaggttctctattgctacaaaaagccattgagccctcctttgttttcagtggcactcagagaatccaagtatgctgattccccatcagtactctgaatcaggtgagacagaaaccagtccctgtggcatcccctccaaaagccaggatgttggattatgttccactctttttttcctctcaagggagaagtcagaattgggcttttcctcccagttgtatggagctgtgccagcttggggaaagggtaaccacaggtgacatgaagtggctgttcttacttgtttcagtgtggcattcttggctttgagcttctctggggtactgtgacatctggattggtttctagatttctcataaaggtattgttgactgtgcattgttgttgagtcagtaccttgtagggaataaagtttagggcttcctaatctgccatcttgctgatatcattaaaaaacgactgtgaatttaaatgtggttatttttgctcttcatgaatattaaagacaaatttctgggttataagtatactttaaagttgactgtgctaaaacaacccacagaattgtttcacctagctgtgttaaatgtttacacaaatggaagctgataattattagagttttatcctgaggttttattaagtgacagactctgaaataatttctttgaatatggaactggcaagttggacttcaaagttcagagtgtgttcaatccctcttcttcatgacttgtcactgacttgctggggaactttaggcaagttgcccaacttctccaaaccactgtcaaatggggaaaatgatgctacctctcttcccagtttaaagtggcaattaaaaagataacataatggaagtgtttatctgagagcctggctcaaggtgaagacacagtgagttttaggtattgttatatgcactttagagagtctgaataactttgaatgaaaattcaagcccaggggctgtgcctccagccctctctcataatggcaactctatccttctctacaatgtcagacttgatgcaggagtgcatccttagctctgaggccaaaaattaaatatacaaaacttgggagggcggcccagttgatctggttttaaaatgaaaagttccatgtccaggaaacctcttgagtcctgggcaaaccaggacatacgggaaaccctactagtttctacaactctgtgtatgtgcatactcttttaatgggaatagaatgagaatgttatctatattggatgacagtgatgatggagattaacagtgatgatgacaacagcgatgacgatgatgatgatgatatgcaacagtgaagtaattgcaccactgtttttatttttttatttttttgaggtggagtctcagtctgtcacccaggctggagtgcagtggcacagtctcagctcactgcaacctctgcctcccggcttcgagtgattctcttgcctcagcctcccaagtagctgggattacaggtgcctgccaccatgcccagctaatttttgtatttttagtagagacgaggtattgccatgttggccatgctggtctttaactcctgacttcaggtgatctgcccgccttggcctcccaaagtgctgggattataggcatgagccactgcacctggcccgcaccactgttataagtgttttgtatacattgactcatttaatcatcacagcaaaaacaaatagccccacccagtggcgataggaaagacctttccccagactgtgaactagaaaggcacagtgtgcttttgagtctctccagagcagcccacaagccacctgcatcagggctcctcgccagctcctcttacttttgattatcgtttttttttttctttttgttggtttttgacacggagtctcgctctgtcacccaggctggagtgcaatggcacgatcttggctcactgcaacctctatctcccgggttcaaacaattctcctgcctcagtcaagtgattctcctgcctcagagctcctcttgaagtttgattgagaaggtcagagtggggccaaggattctgccttttaaatacacacccaaagtgatcctgaccaggcacaatgaaacagttctgggatagcgtgtgggagatgatttggggagaatgagggtgacagtttaggccagacgatttttgtgtgcagccaaaggtttttgctttggaaactacattcttctccatgtctcagggaggcttacttagatctgattctatcatttgggtattgtattagtccattttcacactgttataaaactactacctgagactgggtaatttataaaggaaagaggtttaattgactcacagttccccatggctagggaggcctcaggaaacttacaatcacggcagaaggagaagcaagtaccttcttcataaagtggcaggaaggagtgtgagctaagcaagaacttgccaaacacttataaaaccatcaggtcttgtgaaaactcactcactgtcacgagaacagcatgggggaaactgctccaatgatccaatcacctaccaccgccttcctcccttgacgtatggggatgatggggattacaattcaagatgagatttgagtggggacacagccaactcatgtcgttttgccctggctcctcccaaatctcatgtcctcacatttcaaaacataatcatgccttcccaacagtcccccaaagtctcatccaaagtcccccaagtccaaagtctcatctgagacaaggcaagtccctttcaccttggagccttcaaaatcaaaaggaagtttagttgcttgcaggaacaatgggagtacaggcattggataaatgctcccattccaaaggggagaaattggccaaaacaaaggggctacaggccacatgcaagtctgaaatctggcagggaagtcattaaatcttaaagctcccatggtcttgggcagctccgcctctgtggctttgcagagtacagtctccctcccagctgctttcatgggctgacattgagtttctgtgacttttccaggtgcatgatgcaagctgtcagtggatctgctattctagggtctgtaggacagtgaccctcttctcacagctccactaggcagtaccccagtggggactctgtgtgggggctccaaccccacatttcccttcctcactgccctagcagaggttctccatgagggctccacccctgcagcaaacttctgcctggacatccaggcatttccatacatcctctgaaatctaagaggttcccaaaccttaattcttgacttctgtgcacccacaggcccaacaccatgtggaggccaccaaggcttggggtttgcaccctctgaagcaatggcctgagctgtacattggcccttttagccatagctgggatgcagggcaccaagtcctgagactgctcaaagcagcaaggccctgggcccggcccacgaaaccattttttcctcctagacattaggcctgtgatgggagggtctgccatgaagacctctgacatgccttgaagacattttctccattgtattggcgagtaacatttggctccttgttatttttgcaaatttctgcagccagcttgaatttctctccagaaaatgggtttttcttttctattgcgtcatcaggcaaattttccaaacttttatgctctgcttccattttaaacataagttccaatctcagatcatttctctcaagttcaaagttccacagatctctagggcaggggcaaaatgccaccagtctctttgctaaagcatagcaagagtgacctttactccagttcctaacaacttcctcatctccatctgagaccacctcagcctggacttccttgtccatgtcactaacagcattttggtcaaaaccattcaacaagcctctaggaaatcccaaactttcccacatctttctgtcttcttctgagccctccaaactgttgtaccctctgcctgttacccagttccaaagtcacttccacatttttgggtatctgtatggcagtgccccactcccagtaccaatttactatattagtctgttctcacactgctataaaaatactatctgaaggctgggtgcagtggctcatgcctgtaatcccagcactttgggaggccgaggtaggcagatcacctgaggtcagaagttcgagaccagcctggccaacatggcaaaaacccgtctctattaaaaatacaaaaaaattagctggatgtggtggcatgtgcctgtaatcccagctacttgggacgctgaggcaggagaattgcttgagcccaggaggtggaggttgcagtgaaccaccactgtactccagcctgggtgacagagcaagactccatctcaaaaaaaaaaaaaaaaaaaaactacccgagactgggtggtttgtaaaggaaagaggtttaattgactcacagttccacatggctgcagaggcctcaggaaacttacaatcatggctgaaggagaagcaagtacctcattcacaaggcagcaggaaagagtgtgagcaaagggagaacttgccgaacacttgtaaaaccatcagctctcatgagaacttactcactgtcatgagaacagcatgggagaatcctcatacaccccccaccccttgcccacttcctctctggcatgctgatttaaaagtagacttttgacttatagatattaataaacatgccctgattcaataaacccagcagatgttaccatacatagtctccttgggtgattttggggtgagcaaatctaccaaggtgataaatgattttgcttatgattgaagtagcgacattagggatatggattttatattacatgtccacattaatattaaatataaacatccataataataaatattaatattaatatataaatatagaatatttaagagctctcactgcagaaaccgttttcatgcactgggattcatatattcaacaaaataatgttttcggggttgttctaagggctttctatatttcccttatttaattctcaaacctatgatgtagttacttctattatttccatgttacagatgaaaaattgaggcacaaaaaggttgagtaacttgttgtagttatataattagtaaatagcggagtttaaaggacactaaaatgtagtagttaaaaagcaagtctgcaaattcttcgacattcttcccgtagattttttttcagtcaatctaaaaatctggccagttcaaagagatgttgagaaagtgctggagaccagtgctttccaaactgtactgaatatataaatcatttggggatcatgttcaagtgtagattctgatttagtagctgtggggtcctgcatttctaacaagctcccaacagatgctgatgctgtgggtcatggagtgcatagagaagcaaggctgtcactttatttataaaaaaacaaggccaaggaaagtaacttctccaaggccaatagctggtttagggacagagcccgagtaagtaattctaattataggtgaaattcaaagatacacatgatgaaagatttgagtccgatgccaatgaaaccactaaattctgaggtcattttttttttttttttttttttttttggagacaggatctcactctgttgcccaggctggagtgcagtggtgcagtcacagctcactacagtcttgatctcccaggcttaattgaccctcccaccttagcctcctgagcagctgggactacaggcacatgtcactatgcctggctaatttttgtattttttgcagatacagggtatcaccatgttgtccgagctggcctcaaactcctgggctcgcctcaaactcctgggctcaagcaatccatccacctcagcctccccaaatgctgggattacagacatgaaccactgcactaggcacagataatttttaaggcaatctgggatccacaggtattgataaatgattatggaaataattattacctacaaattacttgcttattactttcacatttcttttctatacccatgttttgggttgagttccttagaagcagagcctaagacaaagattgtgtgtgtgagagtgatttaggaggacataatcccaggtaagccagtggggagtggggatttgtgacagggaaagaagccgaggaaggatggagtatccggcaaagtcccatggagggtaacttttgttgaatccccctgggagctctgtggacggtgtagggcatactcagctgatgtcttagttagttcaggttgctgtaaaaaaaaaaaaaaaaaacagaaaaaatcccactgactggggggcttaaatagcagaaatttatttgtcacagttctggaggctggaatacccaagttcattgcgctggcacatttggttactggtgaagaccgttttcctttattctcacatggtggagagagagatcatctttatcatgcctcttcttataggggcactaatcccattcatgagggttttaccatcatgacccagtttcctcccaatctcaccacccatcaaataccatcacagggggttaaggcttcaacgtatgaatttagggggggctcactcagtccatagcagctgtctagaactgtgctgttcgagatagcaacccctagccacatgtggccattgagcccttgaaatgtagccagtccaaagtcagtatgttgtaagtatgaagtatgcacttgattttgaagacttagtacaaaaaagtaaactatctcactagcaatttttaaatattggttacatgttgaaatgataatatttggactctcatggcttaataacatatataatcaaatttattttacctgtttatttttgcttttttgtaaaaaaaatctagcctctagaaaatttacaattacactggtagatggcactatctttctttctttcttttcttttttttttttttgagagggagtttcgctcttgtcgcccaggctggaatgcagtggcatgatctcggctcactgcaacctctgactcccgggttcaagcaattctcctgggatggcactatatttctattggatggtgctggtttatattcttgcacacataaatcactagataaggacattggttaaggcatttctagctctccctgatcccaggcaaaactggcttcagcagcttaagttgggcagtaagccacaggtgcttggctgctgggcagagaagcatactgggagtctacatgcaggaaaacgggaaagagatgcaaagggatatggcagtatactgacagtgcctgttatgatctgtgtaatgctgtacaaagacttagtgatgttttatttatatgtatttgtttttaaaacaaagttcatcataagcaataatattagtggcacctcaggcttcatatgctagaaatatttatttctaagagacattaaaataaacacataactattaaaacagaatgatatttatctgccttctcagcagtgatgtacattacggaactttctggcaaaaaccaatgttcattaatcttcagcaaaggaattctgttaaaagaatagttaatcattttctgatatgtgtaattatgactctccttcccttcgattttatgaagccatttgaattccttcaatgtgttactttgacacttaatgcaatgtttatgcaacaatcaccaaaattaattgtgttccttttggaaactatttaaaatccccatctttggccagccttattgacatgtgcacattaaagtatgactatgcaacaataatacttttacagcaatgaataaatgtcaaattaattatgtcagaattgtaatttgtctgcttcctttctaatatgtataattattaatttggggaaagtgtgcagaaaatattaagcatattgtcagagctgaagctcaacatctaaagtgaggttacttttcctctgaaatgtattctttgggggtttcctttttggcagaatttgttacttgttggccaatgacttttagggaaattccatcctctatctcatatgacaagccaatggctagaaaatatcaatggaaatatcatcagaattttttgtttataaaaacgttgtggggtaggttttctttttgttgtgaataggactgcaccatcttctaatttggtttgccaggctatatatctagctaaaaatagaaagtgcacctgcttcttttcattctttaaatattatatatgcatcctcagagaatccttctccattttggctgaacatttttgatggtgtccttctgccatcatctcagatggcaggaggagatgagctgtctgcctctttctagttttttctttgaattgtgctttgtttataacttttacatacataaattttcatgtgtagtatttctatagcattctttaattggaggtggattcagtgacaagcactgtggacataagtgggtttgggtgggggctctggcaggctcttctctgttgtagtatagtaagaaattacagggtacaactttcagtgtgatttcagcaaagttcgaggaggcacaagactattagagctgttaaatgtggctgtttgccaaacccgtagacccaggcatgttctcgggatccctccctaatcctgttagcacacagcctgcctatatttgcaggggccagctaacctccagtttccaggaatgttctgggcaatccacttccctctcttccaggctgcctctgagtgctgatctctctcttccaccttctctctccttcttctttctcttccaccctcatttctcttttctagaatgtgggatttgggactagtgtgagtgcttaaggtgaactctgtgggtgtagcagcaggttctcatttattataattttggctgctgtgcatatctttatttctttctttctttttttttttttgagatggaatctcgctctgtcgcccaggctggagtgcagtggtgcgatctcggctcactacaacctctgtctcctgggtttaagtgattctcctgcctcagcctcctgagtagctgggatttcaggtgcgtgccaccatgcctggctaattttttttgtatttttagtagagacggggtttcaccatattggccaggctggtctcgagctcccaatcttgtgatccgcccgcctcggcctcccaaagttctgggattacaggcgtgagccagcgcgcccatccagctgctgtgcatttcatggccagaacatagcacaaggacgtggccggccccttactgattggcattttcctgtctccagtgctttcctgttatagattgtgcacgagcagtcattctggaatgtctacctttacactcaggtacgagggcatctgttgggctgatgcatagaaggggaattactcaaacaagggaaatattttaatgttacagaataccacactttcatcacaaaagttttcatctgtatagaaagatttaattggaaatgaatgaagacctctgatatggtttggctgtgtccccacccaaatctcatcttgaattgtaactcccaaattcccacatgtcatgggaggaactcggtgggaggtgattgaattatgggggcaggtctttgctgcgctgttctcatgatagtgaatgagatccgatggttttaaaaagaggagttcccctgcacaaaatctttttgcctgctgccatccacataagtcatgacttgctcctccttgcctcccaccacaattatgaggctccccagccacgtggaaatgtaagttcagtgaaacctctttcttttgtaaattgcccagtcagagatatgtcttcattagcagtgtgaaaacggattaatacaacctcttttgaggtttctttgaaatgacagtttttctggtttcaaagactatgcagactagtcctaaccctgcctttgctccctctaagaggggcatcttcctcatgcacagagcttagtccttcaatgtggtaaggaaagatcaatttcacctttcctcattattgcttttttttttttctttttagacagagtcttgctctgtcaccaggctggagtgcagtggcacaatctcgactcactgtaacctccaactctttggttcaagtgattctcctgtctcagcctcccaagtagctgggattacaggcacgtgccaccatgcccggctaatttttgtatttttagtagagacagggtttcaccatgttggccaggatggtcttgatctcctgacctcatgatccgcccgccttggcctcccaaagtgctgggattgcaggtgtgagccactgtgcctggcatgctttttttaaaaaaataaattttattgtacatatttaaggtatacattatgatgttatgagtgggatccacatagatagtaaaatggttacgatagtgagtaaattaccatattcattatcttacatagttacacattattctttttgtgtgtggcaagagcagctgaaatctatttaattagcaaaaatcctgaatataacacaatataatgttgtgttatattgtacaactatagttaataattaactatagcccttatgtctcaataaaacaaacccggtccatatatttatatttattatatttatattacataagccaagggtcccagtccatggcccgttaaaaacccaggccacacagcaggaggtgagcagcgggcaagcgagcaattcgcctgagctccacctcctctcaggtcagcgacagcattagatctcatagttctcgcaggagcacgaaccctattgtgagctatgcatggaaaggatctaggttgtgcaccccttgtgagaatctaatacctgatgatctgaggtggaagtttcatcctgaaagcctctccaccacccctcccaccctcactgccctgtccatggaaaaattgccttctataaaaccggtccctggtaccaaaaaggttatggactgctgctataagtaatacaaaaattagcccaacatggtgcacacctgtggtcccagttacttgggaggctgagatgggaggatcgcttgagtccaggaggtcgaggttacagtgagcctccattgggttccactccagcctgggcaacagagtaagaccttgtcttaaaaaaaaagtaatgtagtgaataaatgaatatattcttgttataagaatgccaacaatgctcaaatatatctgtgagtacttatttttgcctgacatcttaacatactaaatgctgaatacattttcattcaacagtatgtcatgggtatcacattgcatgtctatatcaaaacatctcatgtactccataaatatatacacctaatatgtacccacaaagattaaaaacaattttttttcttaaaaaatatgttgtggataaacttccacatcagtatatgcaggtctatgattttttctttctttttttagagacagagtcttgctttgttgcccaggctggagtgcagtggtgtgatcattgttcactgaaacttcaaactcctgggctcaagcaatcctcccacctcagcctcctgagtagctaggactgtaggagtgtgctaccatacctggctaatattctttattttttgtacagatagagtctcactatgttgcccaggctggtctcaaactcctggcctcaagtaatcgtctttccttggcctcccaaagtgctgagattataggtgtgagccatggagcctggcccttaccaatttttcaaaaatggctgcaaagtattctatatcctggttttatgattctgattcaaatttattagccattccctaatgatggacagttgtctgcagtttgttaatataatatgatacattcaacatatttgcaccgatttttttgcttatttgtatgtggatatatatcacaatgtggaattgttgggctgatttatttaaaaatgctggtgtagtccataaactaagatagataaagttaagatttgagacaataaacttgcaatccctctttttccccagtagttgtctgaggtattgtagcataaataacaaatgtgtgtaattaaaaaccaaaattagctgagcaaaaatactatccctgcccaaatttcagttttaaattcttatttacaaacactgtttcttgtttttcctgcctttgatgtgaactttaatttttaagtgtaatctaaaccacctttaaaacaaatcatttattcgtaaggtttactatgtcataattgcctggttatttggatgatagatgtgtcatatctgaaaactaactagttatcttttgaaatgtatttcaacatgcattatctgaagcagcaaaggtgagaacactgcgtggataaatatgataaaaaatatgatggatttacaagcacagcactcaggtttagcatttagtcatttttattatgttgttgggtcaaaagtgtaaaagaagaccagcagaggaactgttaaggctccttggagtttttgcctgccctcctgcctggggatggaggtagttctagcctagaaactcttgaatgctttacaaataatagaagccaagtgggaaaagcatgttctatattttaatgctgacatcctcatagaaaaaaaaaagtaaagattcagaatacttggctgtgattcagtacctaaacacttcctggtgtttctcagaatcccccggagactcataaatgctgctgtgttggaggtacccattgctgctgcacacttaggccagtttgtcaaactaacgagctcaagagcgatgctatttctaggttcaaccccatgggggaggaacagagagaaaacaaaaccaaaattcagacagaagagtaatcctaaaggccagttgacaaaaaatttattaacacatatataccaaatctcacccagagtagtatcctttgtggagattttaccctacaaatcttttgctagctccttgagtccaagcattacagataaggtggtatggtttttacactgggtgatgtttattgatctggacttaaaaaacagcactgtctggctttttttcactgacacaatatttgcaaataactatggaatggagaggacgtgttttcctcttgttagggcctattgttttttaagaaaattaacaaaagggagagagaagctttaacactcattgagagggactttttattctgggatttgataactaagattcggggaagatagtgagttttggtgtaatttgtgtcatcaaaacaacccctgtattagagcaggagatacagtatcaatagataatgagaaaagacaatggaaattatacaaatgtatgtttcttaaaagcttttgctacctattattttctagcctataggcaaaatttagagacatataatggatatgcttatattgatagtaacatatcatgtaatttaaaaggctaagtccaccttacaggtttgcctcatgccatgatgaatcattttgaaatgtgattggtcttctaagggattgttcaaagattgtcagtcaatcattgacaaaataactctgtgaggtgacttactacagtttggttttgatgtttacaacataaccaaatgtgaactttggagcttgtaaagttgttctttcagcattataaatttggcagcttcctcttcctgcctcccttctcctcctccttctctttttcttcttctccttatcttcccttcctgcttcaacaaattcacagaaataggaggcctgctgtattaattttattgtttgcttactttcaaatcttttctttcaggcatatttcaatatataattgatatgaagtgtgacaatttttaatttgtcttgactttttaaattttatgatagaaaatggaaaccaacatatataaataatctactaatatttcttaacctttatatatatgctcaagagaagacttttttcttccccctggaatgaatttttttttttttaaagaaagtcaagtattatgtatacacagcttttgaattcttggatatatttttgaaactttaaaacattattatttatattaatctttgaagtatttcctcttgaggaactacctatacttcttgcatagtgacctagtttcaatagtaacattttatagaagctgatggtaaaatttatgtcttcggaccataattaattatgttttgaacttaaacaggaacatctcctttcttaactaaacggccgtgtcttacatttacatgatttgctatttgtaccttaaagaggtgtaatagttttattatgttcttatgtcatcagtaatttcatatgtgagtcatgaatcccatagatttagtggtgctcaaatacacttattgattgattgatttgctatacaattggctctctgtatttatgagttctgtatctagggattcaaccaactttggtttgaaaatattaggggaaaaaagaaaatatacaaccataaaaatacatatttaaaaaattcagtgtaacaactatttacttagtatttacattatattaggtattacaagtgatctagagatgatttagaattacaggaggatgtgcataggttatatacaaatactatgccatttcatttaagtgacttgagcatttgtggattttttggggcatttcttgaaccaatcccccatgaatacccagggatggctgtatatggttgatactttgggaagattttagatttagtataaatggaaacttaaagcgtaggcttgcagttaaatatatttaactgccatcattctagaaaccaagagttgaaaaagccctttagggacttaatgctcttctttccgtaaatgtgtagagcacagctgccctaacctggctcgtcatcagagcttcctggggacctcttaacaacgtggattccagggtcagcccccaggagaacatggctccataggtttggggtacagccagtaagcttcattcaacaaaaccaaacccaatcccaaaaatattccaaacacttttgataatcagcggtgtttgggaatcattgatgtttagcagggcgtgtgaaaggagaaggtacaattatgaatcaagaaaatggagatgtcttttataaagtcactctgcaaattttgggggtgtttaaaattttttttaaattgacaccatgaacggttaattttttttgtatttttagtagagacagtgcttcaccatgttagccaggatggtcgcgatctcctgacctcgtcatctgtctgcctcggcctcccaaagtgctgggattacaggcgtgagccaccgtgcctggccagaaattttttattcattgacctatagctccctaatcctcttactcactagcctctggtacccaccattctcctctctgcttctcagttcaacgtttttagattctacgtagaagtgggatcatgccatgtttctctttttgtgctttgcttatttcatttaacacaacgttctttaggttcatccatgttgttggaaatgacaggatttccttttaattcaaggctgaatagtattcctttgtgtatatgtgccacactttctttatccactcgttggttggtgggtacttaggttggttccatgtcttcacaattgcaaattgatgtatcacatcttctttattcattcgtctggtgatggacacgtaggttgatttcacatcttagctattatgaacagtgctgcaatgaacatgggagtgcagatgtctctttgacagactgatttcctttcctttggattatacccagaagtgggattgctgaatcactaagctaattttgacatcattaaactatcatccttccaagtgcatattcctgatattaaacttcttgggaaattagtaaacatgtatatgtgctcaccagggcatctctggggtgtgtgggttgtggataaacacttttgttgaagggcttttgtccatataaacaatttgattaaaaaaaatatatattttttgatatagagtctccctctgtcactcaggctggagtgcaatggtgtgcaatcactgctcactgcaacctctgcctcctgggttcaagtgattctcctgcctcagcctcctgagtagctgggatcataggcacccaccaccatgcctggctaattttagtatttttagtagagatggggtttcgctatgttggccagggtggtcttgaactcctgacctcaagtgatctgcccaccttggcctcccaaagtgctggggttacaggcatgagccaccatacccggactaaaaaaatatatcataaaactcatgggcttgtatgaggtatgctagtcatcaaaggagaagagaagaggtagtcacacatttgtttattgtccaactggcacatgggaagattctagtgtccaggctccattgtgtcctgttaaggtccagtagccattgcttccattcttcattatctaatgtgctgattcaggctaatttcatgtcttccaccaggagaatgagggagccacactgtttttattcataatgccatgctctttggaacctgtttgcattgagacaatgtaggccttcttgcctttgcaatccccagtgccatttacatcatcagttctgatggctgcctcattcattggactggccatgaaccctggcttctgatgactctctcaaaggtcatgactgtgtgtccatgatggtgaccacaaatggaagtctcactcagcatctgcagggagatgtgaatggtagtttgttttctggtcttgttaaatttactgtttggaactttagagtgtaaacgtagaaagcctatcttctgagtatatcttcttttggaatctttaggtggtagctgcaagaactcttagtatgttgacctcacctctgccttccacataccactaccagtgaggaattaggaatgcatgagaagagtgtccaagaagagtgtcctcattcatgcaaggcttaagagagaatgcaggtcaacatcaccatgtcaatcagaggtaggtgagctcaccaattggaaaggcccattggtgtggggatgaatggtcttgaaaaagcccttcaggagataggtgtgggcacccaagaggattgcctaatgtgtggtatgaagctagtagaggttgtcgggtgactgcattaggagacacaatgtatagaatgtcagttgccacccccactatcctaagatgctgtagaccagaggtagcatggtgaggggcacatgggtgggtgagagcctggcatgggcccacagtgtttagtttaatagtagtccagaaatctgatgttgtcttgtgccgcgcttgagtgagaatcatcaaaattggtgtgttagccccattctacttgtcaatcttgtgcaatcacatgaaagaaatgctgtgccagctggcagggagctatctgctggtctcctggaattgggatctccccagatgacccgtgcgtgagattcagggctcctctgggcagctagtggacacatgtgggatagtgggctggagagcaacctggaggggaaaccctgggggcaagggggggtccatgaggtaggccttgagcatcccacctgtcactactgcagaccctgccctccctgggaggggacttaggccacttacacctggggcctagagcaggactcccacttcccgcatccaaggagggtactggtactttctatgtgccttgcagtgttctgaatccttcatgtaacttagctcatttaatcctcatggtgccccgggaggtatgaactgctattatcatcatcctcgctatttcacaggtgtgaaaactgagacttgagagaggctaagtgtgtgctaaggaaactcagctagtaagtagctgactggtatttcaacccgggcagctcaattgcagattgtcaccttaatcccttgctatgctgtttctcactgtttgaactctgctaaagacaatataaggcacactgcataaagttgctttttatgaacatattaccactactttatgtttgcatgacctttaatagtgtagtcaacatttgtctcccccactgcatgctgcattccaatcccactaccccaattctaacagtatcctgatttcttgttcagaaattatctttttctcatgggcatggtcaaagtgttctgtctttccactataaggccaaaggagtcccttccagaaccttcttcttaatattacagtgcatttcaaagtgagcaagtgagagtctgattgagcaagtcagctttcacccaggacttccaatcatgagcctagtgactcagagatggaaaaatggcccaagagcagtggaccctgatatgttgtgcatgtttgtcccctccaaatttcatgttgaaatatgattcccattgttggaggtggggcctggtgggaggtattggatcgtgagggtggatttctcatgagtggtttagcgccatcctgctggtgatcacggagtccttgctcagttagctcatgtgagatctggttgtttaaaactctgggacttccgccatctctgtctctgtctcttgctcttgccacatgatatgcctgctcccactttgccttctgccatgattttacagtgcctgacaccctcaccagaagcagatgccagagccatgccggcacaacctgcagaaccatgagccaattcaacctcttttctttataaattaaccagcctcaggtgtttctttataaccatgcaaaaaataaccggacacagaccctgacgaacattctctgtcagttccttgattcctgatccttgttcctacttgactttacagccttcccataaattgtggaagtctccaaatacccttctagtgaatccctttttttccttttgctggctaaaccaatttctgttgcttgccatcaaagaactgtaactgatacagcatatggtctcatatgcgattctcactagccagattggagtgggaaggcggtatcaccatccctgttttatagatagaaaactgttcagagaggctgaagaagttgctcaaaagtacacagtgagtaagggacagagtcaggatttgttcccacagtattgacctctgcttcagagggcaaagataatcttgattttctttcatttctttattttctttcattacttttccatttccattagtggcagagcatggcttaaataccattgcatcttagccaatggcggaagctctctgagctttattccctcattaatgaatggggataatgatagtaactacctaaaaaaaaaaacctgttgtgagaatcatgtaagagaatgaccttggaacatccttggcacagtgcttggcatgcaatatgtactcgatacatgtaattcccatgtcaggagtgacaagatagaattcaagattcctggacattgtttaggcgttataatacacttaaagttccagctgggcacagtggctcacctgtaataccagctctttgggaggccgaggcaggcggatcacaaggtcaggagatcgagaccatcctggctaacatggtgaaaccccgtctctactaaaaaatacaaaaaattagccagacatggtggcgggcacctatagtcccagctactcaggaggctgaggcagaagaatggcgtgaacccaggaggtggagcttgcagtgagccgagatcgcgccactgcactccagcctgggcgacagagcaagactctgtctcaaaaaaaaaaaaataaataaaaagtaaataaataaaaaaaataaagttccttaacactagaaaattggttgaagagccctcagaacaacagctctagttgggtttgatgaggatgctgaccatccaccccttgggttccccagtgaagatttttgcagtggtccaccaaaacttcggtgggtcatgcctttgagcaaggagatgtattgcactgtggagcagtaaggaggcaatgggatgggatggggagagctgaggtctcacaggaggagacctggtttgaatcctgactccactccttctgggcttcatgactggacaaatagtttaagttcttggcaacactattctcacttagaaaacgggcataacattgtcatccggaggcttccttgttccaggggatctggagaaactctgacctcagttcccctagttctagggttgtggccatccagcccttggatgtcatactacttttgtgaattcctgggagacttcaatgcaggcaccctctgttggaagaggagtgaagagaaacctaaaaaaagtttgctcaaaagattctttgaaatcttttgaagtctccagaagagactgaaatgccttaatgggcaagtttgtttttacttcctctgggctccagacctgcgctgtccagttgaactttctgtgaggatgatcatggtctatatctgccctgttcaatgtggtagccactagccacatgggtcagttttactgaacacttgaaatagggctcatgcaatgagacactgaatttctaattttctttaattttaattgattacagtgtaaatggaaatagtcacacgtggttcatggttaccatacaggggaggaggctctagagggagaagatgccagttatggagaacaaagaagctctacttgttacttgagtggtagagtttaaattcgtaatcctgctgtatgtagggtgtggcctctgtttctgagactgtaggtgatgggcatgcagagggccaggaccatgagcctggggcagaaatggggagcagagaggagcaggggcaaccccagtaacaagaaaggaaggaccataggaagtgatcaccagggtcccttcacaggttattgatttttttttaaaaacaggatagggtatcactatgtttcccaggctggtcttgaactcctgggctcaagggatctttctgcctcagcctcctgaggagctgggattataggcatgcaccaccatgcctggcaatttttgaaagaaccaaacttctttacagagaggaaagtaatctcagaaagtaggttggggagaaaattagtcaaaagataaaaagttacttgaaaggttctattttaagccaaaagatactgtatgtaaacaagaagagactgagatgccttaattggcaaatttaaatttctatttctacccatcccatctgcccaccccattgacccaggggtcaaagagcaagattaagatcagttatagaaaataaaggtacattttccttcataaatgaacatagcatgctaaagatttttttatttgattataataattgcatatttatttatgtaattgctcagttaatgtctattgccttcttggttgtaaactccccgaggcaggggttgtgtttgctgttctcatggttggataaaagaccaggcggaatgtttggcacaagggttgtgtgcttgggacatattttctgaaaaaacaagcttagtctagtgatgggcacccagcagtttatctgtgatttaatttttccagcctcatatagcaagggccccttaaacagagtaattgaaatgtatttttgttatgtgccacctggtaaagaccactggattcatttgtctgtaatcttgacaaatagtaatttttttttaagtgataagatcttgctacaccttgctgtagcctgctacagcccaggctagacttgaactcctagccttaagcgacctttctgcctcagccttctgagtagctggaattacagacacacagcaccatgctggctgacagatggtaatttttgtcttcaataggttaagaggaatggtcacttaaggacataatcagttggatatctgcttatcagattaaataatcaaatttaatttatgtaacaagttagaaaggattttagtattatctgtagtcaaatttctccaagttttcagtcaaagatttttttgccatcgatatataaatgcgtactattattttgtttttcattaaattaactaaaaaaatcaagcttaattccaatcttggcatcttgtttcacaaggatgtctacaaaatcaaagattttttgtgctaaattttttcctaatatacgctaaaacaaacacatcactagcagagagtggaaccattgtgtctgctacctgaatgctgagtactgcactttgggtgaatcccaaatgcttaactattgaagtgatgttttatggattgagcctatttattaaatatgggaggtccagggtctctgaactggaaactggggtcctctaccccgagggaaaagaagtagctggttatggtgattggcactgttcctagtttcctcaggactttcctggtattggcactgaaagtcccactccctgggaacccatagtcctgggcaaaccagaatggttggtcaccctatagttggcataatcataattttaagccaccatctttttagagatggcttggttagtccaaacaccttggcaaagagagaaaaaaataatcctagacttggaggtggaaaaactgggtttaagaactgactcttggccagctcatacctgcaatcccagcactttgggaggcccaggtgggaggatcgcttgaggacaggggtttgagaccagctggggtaacatagtgagacctcatctctactaaaaataaaatcagccaggggtgtcgtgatgtgcacctgtagtctcagcaactggagaggctgaggtaggaggatagcttgaatccaggagtttgaggctgcagtgagctataatggtcacttcactccagcctaggcaacagagctaggtcttatctctggaaaaaaaaaataaaaaaaaaagaactgtactgctaatttgctacttgttttaatttgggattcctcagaggtagaggagacacaaatttgagtacaactagtttattgggtggtaatcccaggaaacacccataaaggagtagggatgttagactagtagtgagccaagaaagggtgcactattaagcaagttaccactgtgggtaactggagtttaatcccaagtgaatgtggaaagcatgcccctcccacctctcccaccaagtgggagagggagctggggtatttacaccccagtcctgttagtcattggttgagagctgttcctggggatgttaattctcccagacttttggcttgccctgagtgcatgagcagagtgggttcctgccaccagggaaactccttcagcaaagagaagggacgctggcagagggaactaccctagtgaatactattaggttggtgcaaacgtaattgcgatttttaccattacttttgcacctgcctagtaaaatggaaagtccttttaggggctgtgagccaggcaccatgtctgttatagggactgtgggcacgcactttcccttcttgagttatattttttccatgaatcatatgagaagtgggagtttgattaatgcttcctaaagtgtgagacagagacctgccaatatgggagatgattttggtgccacatggacactcgctttaaatagcagggaatcacagggaggaagtgttctcatgtctcagtcagccctccatatatattgacaagaaagtctccatcgggtgctcttttaacccagactcctctcttctcttttaatcttcctcttttaacagaagaaagcagtcttcaatccaaactatagtatctggcatgtaataatactgttttaaaatattttatttatttttattgctagtgtctatatatgaaatatgatcttagccctcctttatttaaagtccagctggttaaagacaaacattaagtcagtaaacggacacatgggatgttaatatgatgaaaattatgatggtgagatattgggtaactctaaatgctctccttgttcaaaaagtccaatgtttctgtgtttgtttgagaaccttgttttgtgatacttcctgttgctgacttttctgatcatatgttgaaccttctccacatgctaagtttagaaatcttttccatgtcaggcgcagtggttcatgcctttaatcccagcactttgggaggctgaggcgagcggatcatttgaggtcgggagtttgagaccagcctggtcaacatggtgaaaccctgtctctactaaaaatacaaaaattagccaggcatggtggcatacacctgtaatcccagctgctctggaggctgaggcttgaaactgggagatggaggttgcagtgagccgagatcgtgccactgcactccagcctgggtgacagagtgagacttcatttcaaaaaatataaaataaaataaaaagtaaaaatcttttcccgaacttcactcaggtggtataaacagagaccaactatgatgaatggttatgtaaagatcgccagtcctgggtgcttttttgagattatgctgcagcaggctttctcagaatctctccattctgcctagagagggattttaatttggttgttattgtcatctgcatcaggccacaagatgacatcagcagatttttgccgaagcccaaaaaagataaatatttaagaagtatttaagagggggtagatgtgttcccatcttacaatcatttggggtcatgcttgcattcaaggatttctaaacaaagggtggtattttaataagaaaagtgattgtggttccagttttgatgtgatttgagatgaaaacgatattttaaagactgaccaaaattgcatttaatagctgaaaagaataaacacttaaaaaaataatgaccttaacaaagaaagttgtgatttaaagcaatacattctaagcatagtctgttttatccataccaaatgtgagatgcaatattttctggaaataggtcaaattctgagtattttgtataaacaatatattccactagagggcgctatttagttgtgtatttaacgttctttttctttttataaaaataaaaaaggctataagatgatgaattctgatatgattcttgttgagcatgttatgaaatttcctcccagacattgttttattttcagcttatatgtgtgaaacttcactttaagaagtatacatgaccctgaatctttcaatatgtatacagtcccagcggtattatggtacaatagaagcaaaagacataagtttaaattattgtaatcccagaggtcttttgactgttgtttctctttatatgttacctcatgaagaaaatttattgtaaatattaatattgtctgtttagatcttatgtgaaaagacaaagagagggagtgtggctctgggtgggtgatcctgtcactttttccagggtggcttttgttatctaaaacaatttacaggagagtctttcagtttgtttttcaggatttcggtctcttaagctcatattgtctccacaatagtcatggcctacatttctttgattctagtttttctagactcattacctttctcttttccctctggtttctcaaactatgctgtatgagatgatagtatttatttatttatttatttatttttgagatagagtttcactcttgttgccctggctggagtgcagtggcatgatctcggctcactgcaacctccaagggttcaagcgattctcctgcctcagcctcctgagtaactgggattacaggcacctgccaccacgcctggctaatttttgtattttttagtacagatggagtttcaccatgttggaccaggctgatcttgaactcttgacctccggtgatctgcctgccttggcctcccaaagtgctgggattacagttgtgagccaccgtgcctggcagatgttggtattcttaaaaccacactggtctacactacctttaaaaacaaattgtgactttccctctaattttcagaaaaaataacaggattttctcaatttatgttatttcactgcattacatttttcttaaacagttttaggttaaggctgtaattatgatattgatataacgcagacatgtcaaagttatttaaacctaatacatgtctgcattttatcaatatacatttatttcatgttcttgtacaaaagacttcattaacatatttgggaattctctaactttgtcctgaaattcccattcttttttaatttttataattacacctatattacagaaacatgtttttataaaaattcaaaccgtaagcatttcataatataattcttaacatagagtcaaaaatgatagttcctcttcattctttcctgcaaatcctcttccttccccagaatagtcactgttcagatttaaatgtgtatcttaagacatttcctgtgcacatgtgtagttgaaaaggaaacctctagtttttattatttttttctgatggaatcatagtctatatattgatatattgctttccttagtgaacaattgtgtgttggccgtctcttcatttcactacctgtaggtctagctcattctttgtaactattgaagaatattctatagtctgtatggatgttctttcatttatttaaccagggattgagggattgaaggtggagccacttgttctgtctctctctctctctctctctctctctctctctctctctctctatatatatatatatatatatatatatacacacacatatatatacatatatacacacatatatacatacacatacacacacacacacacacacacacacacacatattttttttgagacagagtcttactctcttgcccgggctggagtgcagtgccacgatctcaggtcactgcagcctccacctctaggaagcaaatgattctcttgcctcagtctcccatgtagctgggacaacaggtgtgtgccaccatgcctatctaatttttatattttttgtagagatagggattcgccatgttggccaggctggtcttgaactcctgagctcaagccatccacccgccttggcctaccaaagtgctgggattacaggcgtgagccactgtgccaggcccacttgttggatatttttaacagctctgcaagagacatccatgtttacacacctgtgggtgtgtctgtagaatctctagcggagtctcttgatcacagggcaggtttacatttttggtcagcatttctatcctcagaaccatattttctcatttctttctttcctttttttcttttttttttgggatggagctttgctgttgttgcccagactagagtgccatggcacaatcttggctcactgcaacctctgcctcctgggttcaagcaattctcctgtctcagcctccccagtagctgggattacaggcacacgccaccacactcagctaatttcgtatttttagtagagatggggtttctccatgttggtcaggctggtctcgaacttccaacctcagatgatccgcccacctcagcttcccaaagtgctgggattacaggcgtgagccaccgcgcccagctttctcatttcttaaaaccaggaataacttactaaagttatgacctgggagacagttacggaaattttcatgaggactcacctgatgcctgtgaggaggtgggacaacttccgtggtgccacgtgtggatttcatggaaaacctcaagccctagtttcaaggatattgctaggttcaagcagattcaatttcttagaagtggcattggagaccattaatctgataaggtaaaccttccttggttaaagacaacatgagaattcaaatctgtgaacatttgttgagtacctaacctgtgtaagctgctatgttactcatggcttgaaattaaaaatgagttaaatagagtctgtgcccacaaagagggcagcagcaccagcagagatgagatgaatacacaattaaatctaatcccaggccatgcaagccagagacagtggagctggccagaggtcttgtgagttgctaagctgggtaggaaaaatgaggatggatgggagagagacaaagtaaatgagagaggagggggaagagatattgatttgaaaatgaataggaaagagaagagaatgagagaggagaatgagagagagaacaaataaatggggaggaaggaaagagagagagcagatgtgtcttgaaagctgggcagatcctccactagtgaagatgaagggagagagggggcagtggtatagtagaagattaaagaaataaaaacaatgtaaaaatcttattaatttaacctcaccaagacaaccactactcttcttgtggtgtatttcttttccagtgcatattttataatattacaaatattataatatttggatttttccaatgcatattttataatattaaaaaaagttataaaaataaaatttttataatacacagggtccacacatcccagctttggaaatacctcctgggggtcccatcctgctgacaagaatgggtacagaagccctccccaacaccacccagagctctctggaaagggcctgattgcccattcaaatggagctctgattgctaatgttataaaagtagatcctccttcttcaagggcagagatagtttggtctttgagacacatagatgcccaatcaccatttctgggagacaccatccagtgcggcaaagagaaagtcaagcaaattgaatgcctgtatcaaaacatgtttatatctgtctacacttgtcaagttatcaatcaacaccattaggtgatttttcatcacaggcctccatcgctgcagtgcagaaaaaaatggaaaggaatggctggaagaattctggattaaggaagaagttcctgttcattcattaagcacttttttttaaagttacaaaaaaactaattttgttattaatgttatgtttcaattggttgtggcagcatcaggtagacaccccaagtgaaagggaagcagagagtccttggcgtgatttcaggtttcagactccctcatggtctttagaaacatccttctggggcttccttaccatgctgttaggtgtacatgttttccggtttactattaaggacattacaaaggatatcgatgaacaccagatgaagagatggatagggcaaggaatgtgggaaggggcactcagcttccatgccctttccaggtgcccaaacctcctggaaccttcagggcttcgcttacaggaagctccaaactttttttttttttttttttttttttcctttttagtattgtaggtaccaggaggacagggaccatgtctgtttgagaatgtttgtcttccatcctggggaaagtcatcctccacataagaatgagtcaaatgtctccttcgaaatgtagcaagaagcagaaaacaggttgttttttttctcatgggatacagtttgaagcttcagattctacaatatattttaagtttaatttttaatggagtgtagtttggaccaacattttgacagtcagaagagagaccattttagagagaggaatcagcatttataaaagggagataattgatgtattaggggtagatgaggaggaactccagatttcctgacttggatagaacagatggaagcttctgaacatctaaaggtgtcatagacatggatctggtccttaagaattgtacatttgctatttcttctggttgttcaaacctctgttttgtgtgtgtgtgtgtgcatttttcctaggcttggaaaatgtcccagatgtctttgtcatccattgtagcaggcagaggctcaccttcccagcctctcttgcagctagggcgcagctacagccagacaccccaccccagaccctgagcttcttgctggtgagctgaagcaggcaccatgtgggacccatgctggggagtgctgtgggagctccacccaggtcctggatccagcagctccaggggctttcgtggtggtgttcagagccacacggtgatgcaggtggtgcaagcccccggatctgagtctagaggggctccttggtgtttcatgaggtagttcttcaggagcttttggatttgtttcctggctgagctggttctctgtttctcatggggattgtctgatcacaaaatatcctttattaaattccatttccactcaaagtagccagaggtggtttctgttgcttacaactctgattcttgactttaggatgggtgcatgagcagagtggtgagagaagaggctgggagaggcacttttgatgtaagttgacactgaacaaatgcctctatgggcattggctatggtaacaaaatttaatatcctcaggcaattcatagaaaaataagtatatgaaaaattatgcagcctcagtaaaaatgaaattgcaaacaaaatcaggtattaattttatttcagagaggtggaaaacatgaaaaagaaaattctcagtgctggtaaggatgtgggaaagcagacactcgaggttccaccaatgcaaactttctgcaataagtgccacagatacttcttgtccatgtgcttcgatccagcaatttcacttgtaggaattaacctagggaaataattggataagtacattaagatgtatgtgccaagattctcattgcactgttgtttatttcagtgaaaaactgaaagcactcaactgcctatcaataggggattgaccaaataaattcttataccatgcaggatgtatgtattaatgcacaatgtagttaggtattgatatgttttggctgtccccacccaaatcccatcttgaattgtagctcccataattcccatgagttgtggaagggacctggtgggagataattgaatcatggaggtggttcccccatactgttcctgtggtagtggataagtctcacgagatctgatggttttataagaagtttcccctttcacatggctctcattctctcttgtctgtcaccatggaagatgtgccttttgccttctgccatgattgtaagggcttcccagccatgtgtaacagtgagtctattaaacctctttttctttataaattgcccagtcttgggtatgtctttatcagtagcatgaaggcagactaatacacgtatttagcccggccaataggtaagctaatctttatcactgtggaaatgtgtccacaaaatattgtcatatgaaagtctgttaataatggatgtgtgtacattggggcttgagtggggcctaataaagtaatattcttctttcttgtttaagttttgaatcaattgagagagaaccgcaaaagtcagagagatggtgataaaaacatcatcttcattacggataaaagttttatcggaggatgtagcttacgagagtatccacatgggttcattatagcccacccaggcaaaagttacgcttgtggaagattgttgcctcaaagattgcttggttctggggcagagaagaaagggagcaaattgcaaatagccttttagtgtgttagcttacctagttgagatatgtggacaaatggctatcacccattgatatggtttgactctatgtccccacccaaatctcatgtcaaattgtaatccccacgtgtcaggggaggggcctggtgggaggtgattggatcatgggggctgattttccctttgctggtctcatgatagtaactgtgttctcatgaaatctgatggtttaaaaatgtgtggcacttcccccttcagtctctctctcctgctccaaaatgctaagatgtgcttgcttccccttcgccttctgccatgattgtaagtttcctgaggcttccttgccatgcttcctgttagggatgtagaactgggagtcaaacctcttttcttcattaattacccactttcagttagttctttatagcagtgtaaaaatggactaatacacctatcaatcaattaactcactcttttgtggggtgaggacaggagtcttaccatgatcgtggtccctccatagggaaacatgaggactagagaataagtgttcctgcccttagcattatcatgtgattccatttttgtttgaagacacgtatggatgtttgcataaaaagatataaaaataagcctgagatggatgtgtgagaagtaggcttcccccatgggctgggactatgagagggattttcaatatctctttaaaagtcaaatgacttttaaaaataaaggataatatctctcatgagaaaaaaacccagaaatatgtttccattagaaaactaagtttctgttcatgttgcatgcaattcatactctatgtaaatgacatttcattatgcagctggtattttttacaaccagctgaacactgaaaatcaatagatacaggttccatgatgaaaataattactgggattctttttcatgctttctttgatgtcctttcaatgtctggatataaatcaagttcctcctatgccttcactcagattccctttacaaattctctttattttaatttaatttaattttattattatttttttgagatggagtcttgctctgtcacccaggctggagtgcagtggcaccatctcggctcactgcaagctccgccttccaggttcatgccattctcctgcctcagcctcttgagtagctgggactacaggcacccgccactgcgcccagctaattttttgtatttttagtagagacagggtttcaccatgttagccaggatggtctcgatctcctgaccttgtgatccgcccgccttggcctcccaaagtgctgggattacaggcgtgagccaccacgcctggcggtgcaaattctctttattaaaacgacttctcatgttttcattgttccttgagtgagaagtcatactcagtacattcatttgctatgtaaacatgtgagttacaggtaggtatcacgattgaaaaacaaaggcatttacaaataattgttttttgggggtacctgaagacagtaaatttgggtaaacctgcctcccagattttgctatgataggggactgtttcagatgcagttcagctacattcaaaagaaaattaaacacacacacacacacacacgcacacacgaaaagaaaaggaagaaaaagaaaaaggcaaatgattggcagaagaggattactggtctttttcacttaccttttcattttccccctgctcagtcagcttgcatttaagactaaaaataaaccgatttaaactcacacctgaaaaatcagtgagcttttggaggtaataaccaggaggactgtatcttttgttttcagactttcagtatcgaaatctgctacttctacttccactgccctttattgaagtcctaccttgtcccaggcacatagtagacaatggttgctgttcatccaatatctctcttctttcttactagtggaactccaacttttttcaagcatgcagtgtgtccagataacaagcttgctcccccatctgtcttgcaactaggggtggccatctggtgcagttctaatcagtaaggctgaagctgggctttctatgaaaacttctgctttcctgatacatatgcagtcctttccttctctccccacctccactgtcccttggcctttctcatccttcatatctggaatctagatgtgaggcctggaggagacgcagccatcttgtgaccagggggatcaatgcctcatgctgagcggggtggagccaaaagaaggaaggtcagggtcctaggtggcctcattaaccagccctggcctgtcaacttccagacttcctgttgcataagacaaatacattctctactttttaagcccctggcttagagttttctgttatttgcaatgaaaagcattctttttaaaatatggaggtgaaattcacagattataaaattaaccatcttaaaaagaacaactgagtgacctttagtatgttcataacattgtgcagccactacctctatctagttgcaaaaccttttaaccccaacatcaaaagagttcttaactgacacaagtgttaggccaatattgtcttatggaaccttccaacagttctaataaagcaggtattggtggtggacattttttctgcccagtgtgcatcctcccttgtccaggtaacagacatcatttccctctggggaactctctcttccttgcaatccatccctgtggtttgagaagccctgatgtcatccatggctccaccgtgcatggacaatcagagcaccactgaatggggagagtttagggatggggacatgatacaatttgggcctaagtttggatggctggggagaggagttctatttctcattagaaagcagggaagccaagagcagctggccacggtagggagctggtcagcctgagggtgaagctgatgtggtgagggctgtgctaagagatctcaggtagtggtgagagttcggagctcccaaatcgggctgtgctagcagccagctctttcttcaatactttcaaatatttgagtcaattaatctcctttttcttttcaaaatcagtttgaattggattttccgtcaattacaatcaaattagtattgcgattcattagcagtactactgttaaatagtagtagtagtagttgaggtagtagtagttgtagtatttccctgttttacagacttgagatttgatctccaggggtatgtaatttgcccaggatcacccagctttgaactcaggccggcatcattccagggctcgtctgtatgactactgagaaatcacattcccacttctgttccatgctggctgtttccaaagacagggagtcaaactctaccatcttgttagtgaatgtgaatctgtacttctcctggatcccgtgctgtaaacacttgttggacttaggcaggaagaaaagaaacattttcttgaacagattaacttttggactccgtacttataattagctagttttgagttagttacagtaacctctgttggttatttatttgatcacacatgactctgatgcaaaacagctttgctttggtctcctagtgacctgcgtgaactgcatcattaggcagctggtagaggtctgactaattacagcaaaataaaaaggaaagtctaaacactcctcctcttccccaaacattctttgcgaaacatgccttgctgggccctggactacttcatgaaaacgtgtcactaacaaaatatggaagaggcagaagagcctaatggaaacagttttattgagtgcctctgtgacaaaaatatcttcaaagggagttctatcaattttattaagctacattgtgcacttttacatgacaagcatatcaagcacaatagcatttgaattagcaatcaagttttaatcgtatttgacacttccccaccttgtactggcagaagctgtctctctgaggagcgacgccatgcaaggagtcgtcagcctccaacggagaaatgggtggcgtccaaaagttcatttgtgaatttgctagttgattctcagaatacatgtttttcccccacacttagaatggtatttagaatcctgtgctcacacataaaagccagtttaaccaatttttattaattaaggggctttggttgcaaatggcagaaattaactctggttaagttaagccaaagagaaagtcctggaaggatattgggaattttgaatcaggagaaggctgaggggtcaaactttctgagaggcagccccagagtcctgcaaagcaacagcacaggaatggccacatcttgatttctgttgtcactgtgactaccagaaacccactcctccctgtggttctctgcctcggcccttcctgaggcccactgttggtctcatcgtggccctgatgaggacatttttgaggcttcatgatctctgtaggatgctgtccatgcccatgcacacaacaagtgcatctgtgaggcccacctcacatctcagctcctgctgtgctgcgatgcagatccccagggagctcggttccacacagtcactcagggatccagcagccccttcctcctgtggctctgccctcctctgtgttggtgtcctttccattcagtacacagatggggaggaaagtgatgaggctgctacgggcacccagcagcctgcatgcaccagtatgcacccagttcctcaggacaatgtgttggaatcatcattgaatcttctgtttccctcacactcctcatccattccttccgtaaatttggtcagctccaccttctaaatatacccagaatctggatataacccccacaattataaccctggttctaggcagcatcatttcttggctaaaacatcacaattgcctcctcactggttttccttcctcctccttcccctggacagtctccactccactcagcagccagagggattgtgtcaaagcctgtgccagatgatgctgcttccttcaagggtttatcatccttgagtaaatgacttgatctgacttgatctggctcctgtcacgtctccatctttctcatcaactgtctttccctgccatccttctgccccagccacagtgacttcctccttgatggtcctcaagtatgctcagcatgctattgctgcctcagggcctttgcacttgctcttccgtctctctagaacattcttgccagagcttctttgctcaaatatagtttccttagagaggcttctctgaccagcctctgagacagaagccccacttcctcgttcctgttgaaatctgttcgttttaccctacttaattttttcataaccctcatcaccagctgatgttatataagactctgatgtgtttattgtttgacacccttgcctaggataaatgttccttgaatttctttgttttttcaatttcacgtcctcacactggcatatattaaatgctcgataaatatatttttggaatgagtgaataaatgaatgaattcatgcgtggatgaatataggaatagactcctgaaaggaatgaactgcaataactttttactttaatatccaaatttgaaggaggggtttctgattggtgtaggatggctaacaggcccacatcttgcctaagggagaataaataccactgccatgagcttgtgcccaaaggaaagaaacagtccccaaaagcaaaatctgctctatgtttagcagatggtaagagattcttggttcaaaggtgagggagctatacccaccaaagcttgaactagtgagtagaaatttaataacttcgtcttagttagggatactttatgcttcaagtaacaaaacccatgtaatagcagcttaggcataccagggcttatctttcatgtgtaccagtccatggaaaggcagttactagaacgggttcagtggctcatcagtatcagaatctgggctggaatctctgcgatcctcttggcctttgcctcatggtcacagtgtggcagccatgtacccgagcttcctgccttcacacgtttttcaaaggaagaaaggggttggggacaagtggcaggatgtgttcttctagtgcatttctttctaatcgctgaaagaaatacctttcctagcaaccatctgagacttcccgttattgctccttgccaaaactggagggctggacaatgcccatttggcctttccagtctctgtggtgagagccgggcaggggagaagtgtgtggagaagtctgctgggtcatcgatcagtggtgtctgcccaagatcaagcagctagaaggtagccaggggaattaatatttgctctgcattttgtctgatgggaaagtccaactcttagacactatgtttcattgcttcttgggaggaaaactttgctttcccttttgttttgctttgtttttttttttaaagatgttttctcagtatctggacacaaatggtgacctattgcacggttccatttacgtggaatgtctagaataggcagatctatagacacaaagtggactagtggttgccaggtggcaggaggcagcagggaatagggagtgactgcaattggatatggggttgcttttggggttgataaaaatgttgtgaaattagataatggtgatggttgcacaactctgtgaatatactaaaaatcattgtattgtatattttgaaatgttgaattttatggtatgcacattataatgcagatattatttaaaaataaatgctaggctgggcttggtggctcatgcctgtaatctcagcactttgggaggccgaggtgggtggatcttttgaggtcaggagttcgagaccagactggccaacatggtgaaaccctgtctctacctaaaatacaaaaatttgttgggcatggtggcgggtgcctgtaatccaggctacttgggaggcagaggcatcagaatcgcttgagttggaggttgcggtaagccgagattgcaccactgcactccagcctgggcaatagagtgagacaccgtctcaaaaaaaaaaaatgctaaggatatactataatttttgtaacccattacatttaaaaatataccaggaacttaaaaaaaagactctaagtgtccgagtcccctctggcctctaagaggacttaggcacattcaccccaaagtgttcccaggttccaatctgtccattaattttcctcacccttcttttgcagatcagaacttattttcttttattccttttaggtctcctttttaggtaattttccatgtgtactcacgtataaaaagtatcttattttcctcacactctcaggacctcattaaattgcaaactctacaagacggcacttgacataagagcaaatattgtttctgtgtggtagttcctcatgttgctgctaggtggagggccccattagaaaatattcgagaaggatttgagggcacgccacagcagtgttgggctcgctgctttaggatggtgggggagtctcagctctggatgcacttgagcatccctggccacgtccatgatactggagcctgggattcatgcacagagatcatgacgccattggtctgggatggggtctgggcatttgagctccccaggtaagtctaatatgtagcaaggactagaatagtggttttcaacctaaggcagttcttccccaaggaatgcaatgtctggagacatttttgattgtcacaatggatgcgtgtgctactgtgtctgtgggtagaggccggggctgctgctaaacatcctctaagcacagggaagttcccatgatgcaaagttacttggctcaaactgtcagtaatgtggagataaaggaaccctgggttagaggaagcaaagagaaggccagctaactgcatcctcagactatgactctatggcaggtggtggcaggctggaagtggaaacacacgaatgttatacacaggtggctaaatggctgatcactggaattcactgctgtggttaaaaatggcattggtaatgatcagggaaatgcaaatcaaaaccccattgaggccgggcatggtcgcttacaactataatctcagcactttgggagtcagaggtgggatgattgctggagcccaggagtttgagaccagctgagcaacatagcaagacctctacaaaaaataaaaacacttagctgggtgtggtggcatgcacttgtagtcccagctacttgggagactgaggtgagaggatcacttgagccagggagatggaggctgcagtgagccatgattgtgccactgtactccagcctgggcaacagagcttctgttttgagactgtctcaaaaacaaaaataaataaatacataaaataaatagtataaacaatgacatattacttcagactttttaggatgacagttacaacaaaacaaaacataatgagtgttggcaaggttttggagaaactggaaccctttgtgctgtttgtggggatgtaaaatggtgcagccattatgaaaaacagcatagaggttcttcaaaaaattaaaaatagaaccaccatatgatccagcaatcccacttttgggtatttatacaaaaaatttgaaatcagaatcttgaagaaatatttgcacgcctatattcattcagcattattcacaatagccaagatgtggcaacaacctaaatgtcattgacagatgaatgaataaagaaaatgtggtctctacctacgatggaatataaatgagccttaaagaagatggaaatgctttcatatatgacatgaataaaacctgggtgaaataagtcagtgatatggactaattatggatctgtgtccccatccaaatctcatgttgcattgtaatccccagcgttggaggtggggtctggtgggaggtgattggatcatgggtgtggatttctcatgaatggttttgcactatccccttgctgtgatagtgagtgagttcttgtaagatctggttaagagtgtgtagcactggccgggcacggtggcttacgcctgtaatcccagcacttggggaggccgaggcagacagatcatctgaggttgggagttcgagaccagcctgaccaacatggagaaaccccgtcggtattaaaaatacaaaaaattagccgggcgtggtggcgcatgcctgtaatcccagctacttgggaggctgaggtaggagaatcgcttgaaccagctactcgggaggcagaggttacagtgagcccagatcgcgtcattgcactttagcctgggcaacaagagtgaaactccatctcaaaaaaaaaaaaaaaaaaaaaaaagtgtgtagcacctcccctctcattctctttcttcctcctgctcttgccatgtaagacacctgcttcccttttgtcttctgccatgattggaagcttcctgaggcctccccagaagatgagcagatgccaacaccatgcttcccatacagcctgtggaactgtgagccaattaaacctcttttctggataaattacccaggctcaagtatttctttatagcaatgtgagaatagactaatagagtcagacacagaaagacaaatactgcatgattccacttatatgaggtatcaaaaataataaaactcatagaagcagagagtcaatagcagttgctagaggctagggggtgggtgagtgtggaatgggtgtggggaatggggagctgctgttcaatgggaataaagtttcagttaaggtggaaaagttctagagacctgttgcaaaacattgtgcttatggctgacaatactgtaatgtacacttaaaagtttgttaaatgggtagatttcatgtcatgtgtacttccttatcacaataagaaaaaaattgcatttgatacctttgtaagttccatggatccaggtctccattgttgataagctcatccaaaagcaaggcagaagataggttgttaaaattcttgttatttttacagacattctacagctaaaagccatcaactgtcaatcacgatgagcaaatgcctattcacattcaagatgaagaacttttgacaattaccatgcatctttattccttcagcaagctttcagaattattgctttcattagagggaaacttgggccacagcatcacactccaggaaacagcacaccattatttgtgataaggagagaacagtagataagaacaaacatgcacagactcaggagaaaagtctctgtgggctggagtgaacacccgaattggatgcagatcatgtgcaagccaccaaagcaacaagcaccctctacatcctgcgacaaatgttgacttggtggatttttgtttgtttgtttaaaaccaatcacttgatatgttctcataagccatgcaagagattgctatcatggataatgaaaacaaaatgacaggcagataaatttagttgctgttgaagaaatcttgtgaggtattctcaatagtataaagataaggaaatcacataattgaaaagagctgaaaacagcattagcactagacatataaggaagagagcaaagaaatcaattgggggatgcaggaaaaaaagttcaaataaggccaagttctctctgatgggtaaaattgtctactgtggaagccagagggtctagtcctctggttctcaaccttgactgcataatagaatgcccaggagggctttaactgcccctgatgcccacagtgtatgttttccagaccaatacaatctgcagttctggggtaggaccaggtagtaatgtgttttaaagctccccaggtatgatggtttatattgagtgtcaacttgattggattgaaggatgcaaagtattgttcctgggtgtgtctgtgagggtgttgccaaaggagattaacatttgagtcagtggactactaggaaatgtagacccactctcaatttgggtgggcacaacctaatcagctgccagtgcagccagaataaaagcaggcagaagaatgtgaaaagactagactggctttgcctcccagcttacatctttctcccatgctggatgcttcctgcccttgaacatcagactccaagttcttcagctttgggactcggactggcttccttcctcttcagcttgcagatggcctactatgggacctcaccttgtgattgtgtgagtcaatttccttaataaactccgctttatatatacatctatcctattagctctctctagagaaccctgactcatacaccaggggaccccagtgggcagccaagtttgagaccccatggtaaggactgcctctctgtacccactgtagtgcaggcatggcaacttgtcttggctcccatcatgaactgcccttgcaccttgagctacatagaggtactttatttagaaagtgtttgtggcaaaggcactggggacagtattgtaagcccaatggcagtgaagtccagtagcagcagcggccctggtacttgggagctatcctaatgagaatgtccttgaagtggttcctgtgacacggctcccctacattgctgttcattttcccagccctgttctctaaacttcctctgaatttgggggacttcctgatttcctgctaatacattgcatttctgctaagttcaccggagttagtttctgttgctgcagtcaagaacccttgactgattttttgttgttaaatatttttcttgaaatggacagattaaaaaatacctgtttgagcttcgtcctaagcaacgatatccacagtattcctttagatgtgttagtaaaatttttctgaatatgcattaaaatacctacacaattattagaataaaaaaatctccgtattacctaaaactgtcttgcatcccatgggctcacgtgctaccctttgagaaaggctgagttatgattcttttagtgcagagaatagaaagcagagctgagtagcttcagccaaataaggtaccgatggagatttcttataaaacgaaggaagcagccttgagcagtgcagtcacaagggacctagggacttagcgagggttgtatccctttcctctcaaagagttctcaacagtgtaacttaattccagtatgtccctttgaaacttgcaaacactgggcaggaagagattcagctgtggccaggaggggctgatcatggagtgtagacagctgctgagggccccagtccatgatggtggtggagggggcagttcaagggaagggtcattgctttaagcaaggtaaccaccagaagaggtgccttccacgttataagaatatacacataaactgggataggctgtaaatcaggcaggttatgttcaattgctagtgacaaaaaacccaaatttttctgacttaagccaaaaaaaagttcctttattgcctcagaaagttggactgtctaggaatgagaaccagcctgagtcattgctgaatccagggctccaatgatgatgcgaggcctggtcttggtcttgcttctcttcttctttctctctcttctctgtattttttgcgttctctgctgggttttatccccctgacagccccagcagttctgggattatctgccatccttagagacagccatttcagggccaggagtgtttctcttcagtagttttagcaacagtcctgggagagactcccattggttgggcagaaataatatgctcattaatatgctcatccatgaaccaaccattgtggccttgggaggcttgaactgcactgattggccaggtgtgagctaagtgcctaccctggatggactggaggtggagtcattctccatcaaaccacataggctagggtcatgaatgagctagtaaatcttgaacaactgactctgagtatggaggtaggaaacattttagcatttgccaatttccctctgtaaattctgccacaatggctgatttcaaactctccacataatatcaaatgacttaggaagttcctggtttctaagtcatttgaaattatgtgaagagtttgaaatcagctcatgtttccacaatgagctgtgtgagttggctccagcattgcactggctgagaccaagggagaggtagttccttcaagaaaatcatcattctagtaccagcactggaatattcggtaattgatgtggggcagataaaaccaacagatacctgctacagaatgtagtgaagcttccatttattttgtgaaagacctcttgagtgtttattctcataaaagtgctaagaattatgttctagaagagagaattcattgacccttcaccaaacatttattacctaccaaggacagatgccacctcaattttggaacacataactgaactcattctctagtatgggaagccaatatgtaccaagagcttgtaggacacatggtaggtgccatcatagaggacacatggtataaaggagggagtaggcaacatatatggaaaaggggtgacttctagggaatgtttcacaaagcaggacttatttgtgctggatctagaaggatgagtgggaatttgtcagactgttcacaacaggtggtgtattagtctgttttcatgctgctaataaagacatacccaagactgggtaatttatacaggaaagaggtttaatggactcacagttctacatgtcttgggggcctcacaatcatggcagaaggcaaggaagagcaagtcatgtcttacgtggatggcagcaggcaaagggagaacttgggcagggaaacttccccttataaaaccatcagatctcatgagacttcttcactatcatgagaactgcatggaaaagacctgcccccatgactcagttacctcccactgggaccctcccacaacatgggaattttgggagctacaattcaagatgagatttgggtggcgacacagctacaccatacaggtgggaaagggtggaggatgccaggctgagcattttcagagtcataggggagtgaaatagctctaagtggcttcagatgaatgtaggtgggaggtagtccagggctgaatcttgcataaagttttaaggatgttggattttatccttctggcttggagtgaacaaagcgtttcaagcagggaaaaggatcactatcacactggtattttagaataatctctccagcagttgtgtagggaattgattctagagaagggacaccaaaaacaaggaaattagtcagaattcaggtaagagaaggtgggaagagcaaggaggtagaaaggaatcaacgcggtggccaattgggtgtgagggaaagaggtgaattcaggagagctcttgctgctcggatccgagagtggctttaacccattgggaaggacaggcttatacataggagagaaacttaaaatctacattgcaaagaagtgagaccttagattaatatcatacatgaaaataactggtggtcagaaaggagggatattaactcaagaaaattcatgaaagaggcagaatgggagatgcactttcactaccagaggttgcaattgatggtgaaccagagacttcagtgcagatattgtgcccacactttaacttctgtgtccagggctcaaacgataatactaggattcaatctttctaaactcttaccccctctctccctttttccctatggtgctttcactcccagccagacatggactctctccagagaaaaagaaaaaaataaaaaagcttccctttttctggagaaaggggatcagagagtcagtttttgagatgttgccaatttggaagtatatttattctatatttcacaactgagcaataattttaactagctatggaattcttggttggaaagaagtacttttgcattagtattttgaagaaatgtatttattgtcttcaatttccagcataactgttatgatgtgtgatgatgctactataaaccttttaaaaacatttaaccctctggaaagtttttaaaatttgaaatttcatgatgatagaaataaatatgggactttcctcactcactgagctgggtaattgttggattcttgaagctagttttcttaggtttgggaacattttcttggaaaatttctatgttactttccttttttatttttaatttttgttactgttattttctaaaattattatttgggtgttgtatctttactttttcttttaatattttagtcttccattattcatctctttttcctctgttctactttctggaaaagttctcaccatcatcttccaaactgtcttttgaactttcaaaaagtgatttgttgtcctttgaatgttccttcttagacattttattcatgaatgttctatctctctgaagatgtttagcattttttattttttttgtaatatctttgtttcttccaagttgctttttcctactgtttttcatctctgaatttaatgttaagaggttttggtaaaaaacatggtgatgttggctgggcatggtggctcatgcctgtaatcccagcactttggaaggctgaggtgggcagattacttgagctcaggagttcaagaccagcctgggcaacaggacgaaacccggtctctacaaaaaaaaaaaaaaaaaaaaattaggtgggtgtgatggcgctcacctgtagtcccagctacttgggaggctgaggtgggaggatcacttgaatccagtgggcagaggttacggtgaactgtgattgtgccactgcactccagcctgggtgacagagtgagaccctgtctgaaatacatatgtatatgtattaaaatctatagatacatgtacatggtgttgcttggatgcccatttgaattttgaagtgaggcactgaaaagcagactcagtgatttatgtctggattgatcttgttgactggttgacctctttgtgggagccctaggtggtgacttgcctgcttcacggagggagtccaatatatcagtgtctgtagattttatttttcttttgggtaggccaggtttttgttttttttttttttttaggaaacagtggatttcccagttaagagggaggtgagtatgaaccaggtaaccaggactcccagaaaccagagaaaggagggtttgagtgtctttgtcagttgcacttttcattttctagtgtcctccagtccagcctttcaactcaggtctattgtctcctctctgtaggaggaaggtgggggagaagctccttagaatctctgatttcactcctgttcttcatccctgacttcagaaataactggagcctccggttcttgtagctctctagggtcctggggcttaaactggcttcctgttctcttcccaccacccagtcctcagcagatgggaaaacattgaaacctcaatcgcttaacactcatacatccactttctgtctttcaaaatttggctgacatttctctcctgtcattattctcccactctctttgtccttgtgaatttatacctctttagttcctttactgtcatttcagtggggtttggagaaggagagaagatgaacgggtgaattcaagccaccatttttaaccggaagtcctttaatatccttcctattcatttttaatgtgtccatccgttccccgtctctcttcactgctgtatcatactgctcggacatcttgattgagctgttcttgatgactttctttgagtcttttcctgttgagtatttcacaaggtcagaattcacgagtgctaaggtcaacccccaaatgtgcaataacactggctttaggagagcatcttttcctggttaactgctacctgtcatcctcactccatttctttcctttcttgtgggagctgacagaagtggaaaatggggcaagataggaggaactgtattctagattaaaaaaattgcaaatgaaagccacattatagctttgtattttgtggttttattatattttgcaagcctttcaattttttttacataaagccttttgaaaaatctcatagtaaaatttccaactgtgcagaggatcagcataatcctccccagtctctctctcctttaatcttgtgctttttctcctatgaatttggtgtgcatctttccatatcttttaaattatgcttgcactagtgtacaatcatttatttattcaacaaatggcttttgagtccctataatgtgctaggcattgatgtagggactggcaatatgttggtgaacaagacaggctaaatcccttccctcatggggatttacattctagtggatatataaaactttaaacattcaacacatgcacactgcctacccaccagcatcactggccatatcatacacagtgatctgtaagatactttttttcccacttaccacctagtgtatcttttcatgttagtactatggatctttatttttaatggttgtgccatttcaccatatgaatgcatcatttatctactcttctagtaatgatcatttagattgtttccagtgttctgctgttacaaacaatggatcaagcatgatttgttcaaatattctcccattgatagaccttgaagtgttttcagtttttttttatacaaacaactttgtaaaatcaattttgaacatttagttttgtactcatatgcaagaatatctatagtgtatatattcctataaatagaatattggagtcaaatgggctgatgttatacagtatgaaagctattgtcaaatcgtcctccaaaaagtgtgaattcatttgtactcccaccagataggaagaaaagtgcctggttctgaaaaaggtgttttagacatgtgctgtgaactttttcattttaccgtgttgcattttccaccatttccctagttaatttaaatttgtctgttgcaaaactgtgtgcttctagacactgcctgatttacgccacctgagacttgttatcagactccaatggaagtaaccagtctctcaaagaaatgtgaacattaaaagctaatcatttttccctttccagatcttgagtaaacaagcaaaaaaaaaaaaaaaaaaaagaaaatcttggttacaggcctgtctttgtggcagtcatttaacaaaacaaaaatatctaagaaaatccccaaactaggtgtggtggctcactcctgtagtcccagcactttggaaggttgaggtgagagggtcgcttgaggccaggagtttgagaccagcctgggcaacatagtgagagaccccatttctaaaaaataaaagcaaaaacccagccaggcatggtggtgtgtgcctgtagttctagccactcagaaggctgaggcaggaggatccttgagcccaggagtttgagtctgcagcaagctatgattgtgccagcctaggtgaaagagcaaagccctgttctccaaaaagaaaattccctaacaaaatgtctatagtctatatattgcctaaatcacttttaatctgtaacaaaatattatccttcagtctctgtttagaaaagctcagcaaattctgtaaataagatagtctctgttcaatatgtcaataagccttttctttctttctttccttccttccttccttccttccttccttccttctttctttctttttttttttttgagacagagtctcactctgttgcccaggctggagagcagtggcatgatctcggctcactgcaaccttcacctcctgggttcaagcacttctctgtgtcagccttctgagcaggtgggattacaggcgcccaccaccacgcctggctaatttttgtatttttagtagagacagggtttcaccatcttggccagggtagtcttgaactcctgacctcgtgatctacccacctcggcttcctaaagtgctgggattacaggcgtgagccgctgcgcctggcccagtaagccttttcaaagaattctgtgcaggttacagcataatttaattacaaatgaatatgcattcttagatataaaaatgagagatgtctgagtatgataactaagatagacagtgttagaacatcatgatttgaaggatcgtcactcactgttacttccagaagttatgtccaatcagctaccttcgttttggataagatagttcctgtagaattactcacattggatctttcttcctttaatctatttctctgtaagcacatgcaaattatgcttgacttaaccaagcagctctacttcaatttgttgccatgatgtgatgagtaaccagaatggatttttaggctcatcaaatgtctatgctatgtggttcaaaagcagagtgacctttacagcttgcattgtgcattgcaaatctaaaatttgaggctaagataggaaattctcacatcattttcctttcattagaggagaaaacagaattcagctggacacatgcactaaaattagatttttaaataaacagcacaggtcttaataattcatgcaaagatgcagaaaaaaatgaggaaaataattgagcaatggcaggcaaatatcatgtcgttttgtactgcctcaaactaaccctcagtactgtatatctctgatgtacacgtttattaatgaaacaaaaggcatctactatggataaataatacatcatatggatttcacacattctatatataatagagatcagtgacacctatcaattcattttaaatcaggccatgcgtatttcgctcagtctgcagtttgtcagtctctcctttctacttaatagatgtcaaagtttgttatgcttaaaaaatgcaacgtagtgaggaaccaggtgcaatataaaagtaattacaaaaaatcagcaagactaactgcccccacaaaaacagcctaaacagtgatatatttgtgcatttatcattagtaacatgggctcatcttagagatttagtggaagaattcatcagtgtcattaaggaatgaagacattttgaaaacttcttttttaaaaaaattctacaaatctattaaaatatttatgactatagatgaaaagtaattattgtcatctacacgaaggcgttgtcatggcagggacacaaagccaggggttaagaggtgggggcaggagagaaaggtgcaatccaaactgcaaaactggattaaacagaggtttaaaaaaaacaaaaacaaaataattagtggtataacataaatagatgtcattagctgtagtaatgtctatgacaaataaataagagttgaaaacaataaaactcccggtaatgtactctgttgtaatatcgatggcagcatgtggggaacatctgacagctgttaaacagatgtggcaattagcaaaccttatggtcatgctggtaaaattatcatgcaacacgctctccagcagaattagatgacttccttctttgtgtggctttatccacgtggagagttagactaatcctccgtttaagcaatattgttagctgatacagtctaagccacatatgggtgtgtgtgtgtgcgcgcatatatagacatatattttttgatgtcttctgaaagatttagagaaattcagaatttaaacaagaacaatatcaattcagctgtgtagcagatacttcaattataatcgctaatggacaaattgagagataaaaagacttttctatcacgttgaaattcaatgaacagttttcaattaggctttggatgtaaaaggaaaaaaagaaagtgacttttccttgatgttaacattgctgagagagatgagaggaactttgctttttcattatactgaagagatgcatataaggctgcatatttgaattataaatcaggtcgctatctgccaaccgaaagcaatatcaattagaacttaggtggattaagctttaaaatgccttatatttaatgacaaaagtatgactgttaatctccgcagccatcaaagggataatttaaggcagcaagaaatcagagaatgatgtcacaaaaataggcccttgcagctttttggatagtattatcgtaattaatgtacttcaaatgactttttttgtgggttatgagctttcacaaaagcatttattgcgggcataaaatataaaactctaaagagtgggtttgactaaggttgactggaggggccttagcctttctgctacagtaattcctgtaaaataatagtttcatttacaggcataatttataatgttgaatttatgccagttcatctggtataaatcatggtaatagcatgatctattgtatgtcacttgagcgaatgcaaattaaatattgttaaattaaagaaaaactgttaaaataacattgggttgtaaccagaactgctggaatgaaggaaatgtgggattaaggatgaaatttcactgctgtaggtcttgagctgatactggaggttgttgccaaaagcaaatatacatctaaataagtaaataaataaataaactgtactgtgttgttggggacaaagtcatacattaccccagagtgttctttcattgtaatttctaacagcaactctaaaaattaaatagctgttttttggtttggttttgcttcctgcaattctttaatgttttatttggcaattggaaatggagtttctttcttaattactcggtgatttttttttcttttgactcataggcttttttttcccccaggatcattctcaacaaaactattatttatttactttttcagaccttagcatctccctgctaacaggcccaaagagcacactgaggttagttggttagacagcaattgctgattcttttcactgcttatgtagtgaaatgctgcgagactgaatcagcggagctgataacagctttaattcttgaatgtggttctagaaagcttgggtcattaataaacaagagtcattaaaatgcgtctttcacacaaatccacttcttcccacaaacaaaattctttttattccatttagaagttgatgacaactcatcctcaaagccaaccagagccattgtgctaaggtaaatatgggcgtaggacaagaggaagcaagggatacaggcaatattatttcccttttacattacaaaaatccattacaaatcatatcattaatggaaaggaataagttgagattctagggtatggtgtgtgcgcgtgtgtgttctgttacacatgtaacctagcacattgtcagaactcaataaaagaggctaacagaaaacagggcataccggcaatattatttcccttttacattaaaaaaatccattacaaattatatcatcaatggatcacgcttggtaaggaataagttgagattttggggtgtgtgtgtgtgtgtgtgtgtgtgtgtgtgtgtgtgtgtatgcgtgctctgtttcacatgtaacctagcacgttgtcagaactcaataaatgttgatggatggcagggtggcatacccattataacatcaattaatttgctgtcaagaaaaagtgggcccttcaaattatccagccataattgccttggctttgctaacttttccccctacataataggttatgtgagtagttatcaacacatatgcctcaaaaatattcaataaaagactgcatttttccccacatgccgtgatagaaaaaaaagacaatttaatatggtgactgttaagatgtgaatatgtggttattctgatggacccagggagcagggcaggagttgtgaaggaatactcagagcagtgccggacaatctgggtttgaagaggagcagcagagctgtctatcgtttattaagcacttggtcgctgtgccatgcatgagccatctagggccaggacttgggcagggccagtggagcgcttgtttcaggtacaaaatttaggggaagggtaacaacaaaaacctgaaaaatcaagataaatcatgttttcatgcaatatttaaaaaactaaaatgaacacaaaaattcatcatgaacaaaataccaaaattttaagtagacaggagccttctcagaactggggacaaattatatcctaagcaagttaatgcaagaacagaaaaccaaataccacatgttctcacttacaggtgggagctaagcattgagtactcatggacataaagatgggaacagtagacactgttctgttactgtgggggaggagaggagaggaagggctgaaaaactacctactaggggatgggtgctgggctcatgcctgtaatctcagcactttgggaggctgaggagggctgattgctttgagaccagtctgggcaacatagtgaaaccatgtctctacttaaaaaaaaaaaaaggcaggtgggtatggtagtgcacacctgtcatctcagtgacaagagaggctgaggtgggaggatggcttgagtctgggaggtcaagggtacagtgagctgggatcacagcactacactttatcctggacaacagaacaagatcctgtctcaaaaaaaaaaaaaaaaatcaactaccaaaaaacccctaaaacctacctattgggggctgggtgtgatggctcatgcctgtaatcccagcactttgggaggccgaggcgggcggatcacaacgtcaggagattgagaccatcctggctaacacggtgaaaccctgtctctactaaaaaaaaaaaaaaattagccaggcatggtggcgggcgcctatagtcccagctactcgggaggctgaggcaggagaatggtgtgaacctgggaggtggagcttgcagtgagcagagatggtgccactgcactccagcctgggcgacagagcgagactccatttcaaaaaaaaaaaaaaacctatctattgggtactatgctcactacctgagtggtgggattgttcgcacctgaaaccttagcatcatgcaatataaccaagtaataaacctgtatacctacccccggaatctaaaataaaagttgaaattttatttaaaaaacaaagaattggaggcaaaaggcaaaatgtttatccttctctgtgtatgcttgtgtatattttttattggtcagtgttttcccagaacattaaagaaattgaaaacaatactgaaaaactgaaaagtaggtatgttaaaactcacattaagttaatatttttttacttcaaatagaatctattataatgtcactcttttggctttaaggggaacaaaatcatccatgatattttcatttctttatctatttatttttactgtatataattaaggtgtacaacataatggtctgaaaaacctgattctgaaaaatgactgcgaagggcatcataaacttatatccttgtagggatgcaccattcctcctttgcttcaggtgctaagatggatctgtacagcactgtaactgatcctgtttttatttaaaattttgatctttgtttataatggattttttggtattcattttattttattttattttatttttattttagtttactttactttttacttttttactttactttttactttactttacactttactttacttttttctttactttacttttgagatggagtcttgctctgttgcccaggctggagtgcggcagcatgatctctgctcacggcaacctctacctcccaggttaaagcgtttctcctgtctcggcctccccagtagctgggattatcggtgtccgccaccacatctggctaatttttgtattttgggtagagacggggtttcactatgttagccaggctggtcttgaactcctgatctcaagtgatccgcctgcctcggcctcccaaagtgctgggattacaggcatgagccaccatacccagccctcattttgattttaaaaaatatcacaggcctgcacagtggctcccgcctgtaatcccagcactttgggagcctgaggtgggtggatcgcctgaggtcaggagttagagaccagcctggtcaacattgtgaaccccgtctctactaaaaatacaaaaattggcgggggcatggtggcgggagcctgtaatcccagctactcaggaggctgagacatgagaattgcttgaacctgagaggtggagtttgcagtgagccgagatcgtgccattgcaccccagcctgggcaacaagagtgaaactgtgtctcagaaaaacaaacaaacaaaaataaataaaaaaaaatcacatgaaaatatgatttatgttgattactaagttttttttgcatcttgtgaaattctgtgctcagggcgagtggcttgccctcctcacctgatcccagctctaaagcactttacaggttctttcctcctatctttccacgtacacagaggtagccattattttttatctattttttttttttttgagacagggtcttgctctgtctctcatgctggagtgcagtggtgtgatcacagctcactgcagcctcaatctcctgggctcaagggatcgtactgcctcagcctcccaagtagctaaaactacaggcatgtgccactgcatctggctaacttcttttttgtagagatggagtcctgctatgttgcccaggctggtctcgaactcctggcctcaagcgttcctcttgcttcggtctcccaaagtgataggatgacaggcgtgagccactgtgcccaactggtagctgttgtgattatgcctatttttgtaggtgaagaaacagtgctgaccttcatttccccattccatgcctaagcttcacggcttcctgatacaccaaagactttgcattgtaggtcccctgggactctgctccatggaatgctgtgttcacagacgggtgacggacaagcttggggtgcgttaatgctccaggaggagccctcaaccagtgatagaccagagtcagatgatcagtaccccagctttcttgctaggcaggctgatactggcacatggcccatgcagtctttcaggggaccctaacaagtcttcacttgcctccagtaggaacctgatcattaacatgactggtcgtggcctccctgcctcctttgtcatactctctaccagagcttcttgacatcacgttccaaatcaattacttgccctcaaaacctatctcagggtctgtttctagggaagccaccctgagatgctgaagcacagagacgttggctaagcaactcaccaagtttataaatttatgatgtgggagagcaggaattcaaccccagggagtcagctgctagggtccatggtcttatccgcactccaccagaacctttgcaaactacggccagagggcaaagtttggtttgctgcctgtttctgtctgcctgtgagttagaaatagtttgtatagtttcaaatggtcaaaaaaatcaaaagaagaatgatattcatgtgaaaatatatgaaattaaaatgtcagcatccataaataaagtttaatgggaagatagccatgtccatttgtttacatacttcaatggctgtctttgtgctgcagctgcagaattgagtagctgagacagagatcaaatggcctgcaaagccaaaaatatttcctatctggccttttgcagaaacagtttgctcagccctgctccactgcttttctcttccagctttgtaactgattagtggtccctttactaacctctgtgagtctcagattttgcagatgtaaaatggggataaatcactgctcctgtatagttcttgtgaagattgaatatacgaggtaatatttgcaaagttcctagcacagagttcacctcttgcaaatataatagccatttctactaaaataaattttatgaaaatattgttatctcagttgttcccgagcctataaaatcccttattcagtaaccagcagatttttctggggcgttggcatgggagagtgtttgcattctataggtaatgggtgggcctaattgcctgttagttgcagatttctttaaagttgggcaagacatggaaaagcagagaaaacaaatgaataaaaacaaagcagcatgaaaaatgtcaggggtagtatgtgagaaactggaatcaatattcaaaatgcatgcatgtctcaatttttctttgttactgtgtcactgttttgaaaagtctaaattatgcttgcaaaaacttaacgtatgcatacatatgtatgaatgtatacgacgtagcagggttgagacagacaagcacaatagtaggttttgctcagaataagaggcagaagtatgcggtaaaagtcgtttctgtacacagttgagtggtgggtcattccagcagacccttctcagggacgtgcaaacagaccagtaagaaacttcaaggctgtttctccatttttctcaaatccatctcctttcctccatttctgcagttaagtctgcctttatctctctcaggtttacggctccccaacctggctttctttcctccagtgcttctcagtgggagccagttttgctccccaggatatattgttttgtaccataatcaagagtatgcaaagggcatccatccatgggtacaggttaggaatgctgatgaaaccctacaatgtactggatcatcctcccgctcagggaggaattatcctgcccaaaatatcaatagtgttgtggttgagagtccatgccagtcttttcctctgatgggttctcaattcagcagccagtatgatttctattttctaaaatgtaaatattttattttctaaagtacacttctttgcataagaccctgtattgcattctttttgcctgcagggtaaaatctgaacctgaatccttataacatgttaaaaaaacctgtgttgcctgtttcttgcctgttttccccctcatctctctcctctttcgactcatactttataaatgcatcgaggtgttgctcacctgtaggactcggcataaactattttcagactctgagtccataacccttttcacccttttctggtcaacttttatgtacgagtgacatgaaatatcagctcacaggttaccttccccttgatggcagctaccatttaacatgataatcttgtgttgtaattgcttgctcaattatttgtattcctgtttacaggcttacctctcagagggcagggattgtatctttctttttcactaccacatgtgcagtaaaaggcacacagtaggttctcagttaatatttgttgatgactggagtgcttatgctagtttgtttatatggagcaacttatttagaatgttgttaagacatttataaatgtaaatatttttattattattatttttttgagatggagtctcgctttgttgccgaggctggagtgcggtggtgcaatctcagctcgctgcaacctccgcctcccaggttcaagcgattctcctgcctcaccctcctgagtagctgggattacaggcatccaccaccacacccggctaatttttgtatttttagtagagatggggttttacaatgttagccaggctggtggctctcaagtgatccacccactttggcctcccaaagtgctgggattacaggcatgagccaccacgcctggcctgcaaatgtaaatagatgtggcaattcatatttctgggttatgataatattggtttgctgtgtaattataccagctgaaaaatgaggaaaaaaagtagaaatccaaaatggtggaatttgaacaatataaattaataggctgttttagattttttggagaggaagaagaagtattagttaatttaataataataagatttaaaaaataatttaaaagatcactagacaatggacaatgctgttgtcaagaagcgtggagggtctgagatttttaccttgcttgcaagctaacagttaccccactacattttttttttttttttttttttgagatggagtctcgctctgtctctcaggctggaatgtagtgacgtgatcttggctcactgcaacctccgcctcacgggttcaagcgattctcctgtctcagtgccccctccccacctgcccaagcagatgggactacaagggcccactaccatgtccggctaacttttttttgtatttttagttgagataaggttttgtcatattggccaggctggtctcaaactcctggcctcaaggtgaggaggtggcctaaggtgatctgctcaccttagcctcccaaagtactgggattataggcataaaccaccacgcccagctccttcccactacaattttgtagatgctggcagcagacatgagacttgtgggtcagaaacaaaagactttattactcactgtacaacatgcagcatctctccgttgctgccatgagacttgagggcacaaggggaatagaaataaacatgaagctcatactgcatgttgtgttgtgagcaataaagtctttgtatactcatttgcaggcaaaatagatgggatgaagaaacaatgtagaaacatgctttggtttttctgccttatattattcttacaaatgcatcgaatggttctggcaaacatttgaaaatgcatttctctggaaatggcaacagccacctaaccatctagccctgttgatttcttccttcaaatatttctggatttcatccgctggtctttacctccattgataccttgcccccatcttacttcaagctgccatcctctcttaaaggggtttgtaacaatggattcctacatggttcccttcttatcctccagtcattgcttagctagtttcttgaagcccagtttctttatctatgaaatagaaatagcaacattcctagcccataggatttttgtggaaattacacagaatgatgtaaatcagcctgacaagtgctgagattcaattaatgttagctcttatgattgattacttatatatgcacaagccctgaatttgtatcttctatgtttgattttttacaaccaatagatactttgaggcaaaatcttcaaagtgaaattaccccttatgaatggaatcaagttaagccaaagcctttctagtggaaagctgctgtgtaagaaggggagtttaaatttgggaaaaaggataaattagatcagttgatacttaccctttaggaaatattatttgaattattcttctattgccagccaaccccatttcatggggcatgtatatttgctaagcaaatcagaatttttcttttttaaagatctgaaggctcttctctattctattattaattgaatatgtttggaccaatacaggaagaataaaattactacatcactatatgtatgtgagataaaatatgtgattaaagatatttattatactgatgtggaaaacaataatatgttaaacagataaggatgtaataatgcatattttccccataaaatttaatttatctcttgggctgggcataaactttcctcttgaacaacttgctttccaactatagattgctgagctaaactgcttagttttacagcaaattgatcactactgtaatatttcaggagcaaagtgatccttaccagtcactttgatttcaaaggccaaaatttatagttttgctcctgatttagtgataaaattttttaacatattgagcattttatcaccttctatcaggacatggagttgaactcacaaatgaaaaaaaaaaaaacccaacaaaaaagggaccataaataatatagtacagaatgacagaagagtttaatattccctttggaccagtgggaaattactcagatttctttccttgtaaacatatgtcctggtctctatggaagacgtgttatgcaatctctctgctcctggaaagggagtcacagataatgctggagctggaaaccacaaggattttgtaaaagcacagaggaaactttattatatgtgtgctccccagtgtctcaactcgactttattcaaggcagataaaatgtagtttttggacacttctgatatgttcaaaataggtgcagacagttaatgatgggaaagttcatgactcagtaaagattactccctagctggtagcttaggacagaaaactataaaatcaaattatgataatcataggagtcaggagaaaaaagtaggcccatggagctctatttactgaagttttgaattcattatataccacctactgtggaagtataggaaacagattttttgatcatctcagtagatttacaaagtagaactattttgtgattaccaaagtgaatttttaaaaaacttaaaattgtaagagagagaaccggggctagaagaaacatgcaataatagagaataaaaataatcgacatgccccacaatacacttgcacacatccagactttaccttttgaggaacagttggttggacattaaaccagtgaaaacagatgtggctgtctcagtttttaccactaaaaataatttttttccaaacaacatttccatcacatagcagtgtctacctgtcctgacataagagttaaaccattgatctagggcttaaataggactttgacctgcagtggtctattttatcacatgtaacttagttgttgagtcagcaaggccaaatacgcttctactagatatcaaatctagacagctagggtgtgcaagatttttatttttttaccttcactcagatctgtgttttagggagaaagtcggccttttctacctgatattaagaatatctatctggacagtgcccttgagtgacaaatctcattgataattttctatgcttgccatgttaaattacatagctgctagtgttttatatgataccttcttttttgtatgcttgttagcatttataggattcttatgatgtgcttagttttttttgtttgtatttaaaaactttaatacagttctgtaacatttagctattgctgcataaaataacagctacaaaagctcagtgacatgcaacatagacatttcttgattttgctcagggttggtcatctaagcggccctgctgagcttgtctgggttgctcacatatctgggggtcagcaggctgtcagcaggggccactgggtgatggggtgactcgactcagctccacctggctcgtgtcctttggcaggtcagtctgggcatggtctcaggacagtggtagtaggccaagcaggaccatacaaggcttcttggaagcctaggctcagaactgtcacacgatcactttcattacattcttttgtccagtaagacacaaggtgatataagaagctctatttcttttttcttccctctctttttttttttttttttttgagacagggtcttgctctgttacccatgctagaatgcagtggcaccgtcatagctcactgcagcctcgaactcctgggctcaagcaatcctcccgcctcagctttccaaatagctgagactacagatgcatgccaccacacccggctaattttttaatttttgtggaaactgctacgttgcccaggctggtctcaaacttctggccttaagcgatatttccaacttggcttctgggccaagtgctgggattacgggccaagtgctgggattacaggcatgagccattgtggccggctgaggttctgcctctacagtgagtgaaactgcaatgagacatgccaaagagtgcagatacagtgatggagaagaattagagcccttattcaatctgccgtagagcttattcatcctcagaataatgtgatgaggtagctactatcattattccccacccccctttttttttgtgcagggaattattgcagagggtactaaatagcaagaagtcacccagctagtaagtggtggaaccaggaatcgagagagtctgggttctttacccctctgctgagcagtttgattataacaaacacaaaaacaaaagtgagtacaaattttagtctgtaaactaagatgtgcaatcagattttattttctatatctctatctaagcgctaacttggagcttccatcgttctgggctggcagaagaattcagctcagttctttctggaaattgcttcatgaggtggacatttgttagtgcatctgaattgcttcccatgtctgaggaaaccttgtctttgtaaggctgagctcatctcacatctgaagaggaaaaccccagttatgtgctttcctgatctccctggaagtcccaaatggccattaaaagcttgagataggagaatacagggattgcacggagtgcattctggtgactggtagtagcaatggtggtggcaggggcagaagttgtttgggcaccagtgtctagtgtccagcactgttggcatcactacatatggtccaaactcctgcatctgtgcccagctctgttcatgggggcattgtcatggcaccagtattatacctcgatcttgtgcagtattctgactgcaaaacctccaaacctggctctttggagttcctgggggctttgtgagtgacaaagaatcacttgataaatgctcttcctgctggaattaatcagaattagcttcagttgttggcaactataagccccagcctttcctgggtttttcatgtgtttggggcattgcattatgcccaggcaaaagaggtggctcccttgatctgctggctttggccacatagatttcctgcaggaatgttcattgccccattttacctacaagcacagcagctttctgctacctccctgccatgtttgggatgaagggatttgggggaagttgtttatggccccaccttcctcgacttgccctatggtcattccttttctggtgcttgttgcctttctagagccgacagagaattgaagtctgggtctactacctctcctacctctctgtgcccatagatctcttccttcaatcttttgcttaaagccttctcctccagcctgggaggattctccttgtattcttgtgtgatatggtttgactctgtgtccccacctaaatctcatcttcatttgtaatccccatgtgtcaagggaggaacctggtgggaggtgactagattatgaggatgttttccccatgctgttctcatgatagttagtgagtctcatgatatctgatggttttaaaggtggcagttttcctgtgcttgcacttcacttcttgcctgtcgcaatgtgcgacgtgcctgcttccccttccgccatgattgtaagtttcctgtggcctccccagccatgaggaactgtgggtcaattaaacctctttcgtttataaattacccagtcttgggtatttctttatagcagtgtgaaaatggactaatacatagggaaaccccttttcctacatattttctccaatatactttggttttgtttgcaaactgcctctctctcacttttttttaaaagcacatttataaatcacaggattttgtaaaaaattagctaaaaaagactgggggacagtttgtgttctgtccttagttaccatatgcagatctttccacttaattaaaagtgaggaggaggtggggaaaatgccaggacaaaacgcccatttcccatagggtaggctattcatcctaaggtactttcctggcggaatggattccaaactgcttggaatagcttcagtctattattttgacctcacctcttgccatgtatacctcttcctccccatacagcctagcttccagctgaatcaaacccaccaacgggtcctgaatatctccttgtttccacatctctcagcacatatagttatttttctctgcctaaaatatctcttttttccctctattttctatagacaaaatcctaaagaagagatagaggaaattctcaatgatgggtctggatacaatttgggtaaacattttaacaaacggtttggccatttgggggtatttatatatacaaggtccctattttctggaggtttatgttttggtagactaatcagctcaaaacttgagcttctgagactctgggggtaggcaaattcatttgttcactgatttaatacataggaatgggtaccagagaagaattttcaagtctctaggaataaacagaatgataattttcacgtcattttaaatgtaagtgtgctagaaattacctatgggattttgtcctcttgttctcactcttttatcttcaaatggtaattttccagcattttttcattctttcagggacatttactgagaatttaacatatgttaggcattatgttaagtagcagttttctgtatatagaacattaaacaagtagaaataatggggtgtaaacataaagcaatttcattttgtcttccactatcacttaaaactttattaaactgggaaggcttttttcctgcccctgcatgacttttttgatcactcattttaatagaaatttctgcagtcactttaagctactaaacacagtcttagttcagaaattagaatgttttgcaccatataataagccaacctctgaacttgacttaaaattaaatcttctccttcccatagatgtgctctccagggaagcctacatccagtaaatagtcaccttctttctttcctcactctgagtctacaagcttgctaaaaggggtttctgacctttcagtgttcagagaaaggggatagaggagaggctgggaagccagaaagtctacactttactgctacctttgtggaatggctgcacagtctctggacctgggggatgtttaggctgacttttctctcctctgggcattgtcatgggtcctttggagattcccctcttgttggaaacctcacttaaggaaactttctatttttcttctattatgtcttgctcaaaggccaaagatttctcttgacatctcttttccgacttgagacatccaagtcccccatgctatgttcagagagtttacagacatctaggattgttggattgcagtatgtacacaggaacgtactggtacaagatctctttccttctgctctgtggttctgcacacaaaagcccattggtagttaattctctctggcagtttccaaatctttttgtctcatagtcctgtggcttctctgagactttggttcggtttgggagaaaacgttccttggaatgccagtaagagaactgcaggtgagtaaactgaactgaagtaatgcagaataatagttcaagatcgattcctgccacagaccttgagtaaagggctatggaaggtttttctaagaggggttattttacctggtactgaagcattagtctgtctctgaggcaaagtaaagaaaaaggatgttcttcatggaagaaatagggcacctaaaagaaagtgtctgcaggtacccagtggctgcagctttagcaggcatggttgggagggtctgtaatggagaagggcttggcctttgtccagcatccaaggggagcctttggaaggttttagacggagaagtggtatgttctagaaaggtgtagcatggtggcgtatgcctgtaatcccagctacttgggaagctgaggcacgagaatcacttgaacccaggaggcggaggttgcagtgagcgagattgtgccactccactccagcctggacgacagagcgagaccctgtctcaaaatacaaaaacaaccttctcaaaaacaaaaacaaacctacacctgggggaaaaactaacaaaagatgtgtaagatatccacagagaaaaattacaatgcattagtgaaggaaataaaataagctctttaaaaatatagagctctgcctaattccaacacttgtgttataagttggtctgattttcctgtctactttttctcacgattacttttctgctagatatgggaaggagaagaaagagttaaataacacgcatttaaatgtcctcatccccctcccctccaagccagtcactggagaagttgaataaagaaaaacaaaaccaaaccatttgggctaaagaaataattgggagaaaagaaagttgccaaaaagcattgtatatgtgcacatttatttgtaataagtgaatggacgaatgatttaatagtacatatggtggtcttagtatatgcatggaaaaactggaggaatatacggcaaattgttaatattggtgtttggtgtgttttcaagtattatatctgcaatatttactattttttaaaaacagtgagcgtgtattactttggaatcagaaaaatcccaataaatatatacacctgtaaagatgtcacacttaacataacatccaaagtccttatcagggcttacagggccctgcacgacccagcccctctctctgcctaaccttgtttccttcatgctccctcttgttcatggtggtctctttgctcctccttgatcacaccaagcacgtttccagttcacaatgtgtgcatttgacgttctctctgccaggtgcactgttcccaggtatctgcatgggtcccttctccacatcaattaggtttgctcaaatgtcataatttcagaaagaacttctgaaaattcccatctcctgaacttactttatgtttctctatagcacttacccactacattatatcatgtctacttattgtctgcctatctatctatctatctatctatctatctatctatctatctgtctatcatctgtctatccattgatgtcacccctggaagactttgcctagaatagtctctgacatacaatggaaactcagtaaatatgtgttgaatatatattatttgcttttaaacagcgaatacctgtttttacttttatttagtgaagattgagttgtagaaaatgtttgaaaacctgcagccccaacttatagagcttaaaggctttcagttactttttaaaaaacacctttcctcatctaggacagagtttttccacctcagaactatggacactttgggatggagaattctttggtttgaaagctgttctgggcatggtagggtgtttaacaaccaattcaatgctggtaacatcctctcccacccacctcattagttatgacaatcaaaaatatcttcagacattgcctaatgtccactgggagcccaaatccccttctcttccccattgagaaccactgctataggagcgttctagagtcaaatacctctccatttttctaaaaatatgtacagcatcatattgacggagacaggctaaggtttgatctactgctatgctattaggagggaatgagctgaaaattgtcatgggttcttatactttcatgagagttactcaggtctcagcacctctctacattttggttttcttgtttagtataaatgcaatccaatttaatctgcatataaacacatctattgcatattaaaatcaacatattataaacatcaggctgaatgctttcctgaagaagcaggctaaaaaaattcatgcatattaatattacaaataagccaattattatatggaataataaataaaaaacaatatgattaaaactgggagcttcataaagcaaaatatatgatatgaagattagactgccttagaaacaatattacaaatccttgcattttacatgtaatttgtttaaaattaatttcccagtgtggtatcttatttttgtttcacctagacctacactaataagttttaggaaacattgatattacttaaaatcacaacacagagaagaaaccatttctctgctcttaattgaggcaaaccacactgcttagcttcacagtttccaaggccctgaggacttccagatatgctggaattcttgattatatgctggcatggagcagtgacgcactgacctggtttattaaaccatcaccattctttactaccgaataataatagcctttatgagaaaacaatacagttctcgagcacttactatgtgccaagctctcagcataatgattatttaattcaatctttacaactatctggaagtttgatattattattaaccccattttacaaaaagcaaatctgagaggttcatctgcccaagattgcataccattagtaggtgggctgtgctgggctttgaactccatcctgttagactccaagaactcatgttcttaaccattataatgctaactatagagataattagcagcacattgttatcttcatgttaaatagatttttacattgacaacttgccactttgccctcattcataatatgactattcaagtggactccagcagggaacaatgtgccacaggtaaattaaaatacatacaggaagcttagggaaaaaggcaagatggtagaaaggatggcattccagtgagaaggctgttgaaatagcctagtcaagaaaaaatggcagcctggaccaaggtggtggcagaaggcaagaagagaagagatggatttcagagactttattattattttttaaatgagatggggtctcactatgttgtccaggctggtcttgagctccagggctcaagtgatcctctcccatcagcctctcaagtagctgggattacaagcatgtgccactgagctcagtttgatatttcagagacctttaagaagtgggattggcagggcctgttgactagaatcttggggatggagaaaggggagaagagaagaataatacccaattatctgagtcatggtcctaggaaaatggcatccttcattgaactgggaagagcaggtgtggtggaagatgatgggttcatatttctgcaagttggggttgcagggcctgaggtgttcatcaggcagtgggataacagggtgtcttagctaggccacttttcactttcccccttgaatcataaatgcatacaaatattttattcttctttaccacaatataaactattttagggcagtgtccaagatttgtccatccctatctcccttagaatgcatcatcattgctggcacttcaagaaacatgaagaaacatgatccatatctatttgtcttttgtcctcgttcttcctgggatgtgttctgtattttcccatttataatctttcatttttcccactctctccaactaaagacccttgcattccaagctacatctctgtgtattttattccttctcagcttcaaccttcaaggtcaatttcaacttccacttcctggatgaaaatatctaagcttcctctgagcacttgacgtaatagtttcctctttccaacttttgaagcatcttttttgtagcctttttgtaacccagtgaaagtttctctttatatcgatttatattttctgagcctgttctagtgcctggaatatactaggcaggtaatgcatgctagctatttttatcacatgctgtgtcatacacactttatatcaagcagaaaatatttcagtgcctacacggtcctaccacatgctagcaatggatcatgaacatgtcacttaacctctttgagcctcagttttcttatctgtgagactggatcataataataccaaccacataaagtggttgtatggctaaaatgaatttaagtatataacatgcttagaaaattgcctgacacatagtgatggttgcataaatattagctgttatttttatagggacctattagataagtgaatcaagtaagctgaaattgagaaaatgttttcttaaaacacacggattgcttggtttgtctttaatttttccacttttaatagatatatgggtacagagaatattatgtaggtttcttaaatctactctaaggaagacaatagtgtaagcagaatgataaatggtaagtgagacttaggtctatgcaagagaacaataggaagtggtggggactggggagaaccagagtgagcttgccctgtcttagggggcggccactacttaggccaattgtcgtatgagaatgaagatctgatgttgtcatggatttttaagaagctagaaacctgaactttttaatgaaatctcctaatttgtagatgttggcaactaaataaaaaataaattcaatacactctagaatgctgcaatgtgagtgtctgtgctacaatataaaatatacaatataaaataaaacatgcctgtaggccaacttggcccccaggtcaccagtttgtaatctctgctttatctcataacttcctctagggtgtgaactatggcctgtccacagtagacaggcaaaaatagatgttgaactaagttagattttggtgtaagaactctggagtactttccatacatcaaactgggctgaaaaaaataatccaaaggatattttccattgtcgctatttttttgtctctgtgtgcacagtagcataacatgccctgaatgcagagaaaccgtaaactaggtcatttccttagacagtaaaattctctgaaacaaaagcagccaaaaattgatcattttcctgctaaagaagcacatgctctctccgtgagaacacacacacagtttaatacaataaaaccaagcctgacaaaaatgtaaaatgtatgcattttaaaagaggaatttttaattatattaatttaaacagaagccctaaattagttttcctgtaagaatgtgatcaactgcttagtttccctaaagacaacgtgtgacctctacgaggaatgcagttatttgtattcagtttttccccctttcccttctagatatttttccccccttcattttatagaatttaataatgggcgaagtaacaaatgagaagataaaaattcctgaacactctagggcatacatggggatataaacagatattgtagccatttccttaagttacatcatttgctggactatttgactttctaatttgaactccctgtgtattactaaatttaacttgtgtatgcgagtgtgtgtctgtcactgaattcccccaaatggtaggctctgagaataaaatgccaaattatctatttcatctgtgtttctgtccatttatgtatctgtctgcttattgatctatttaaacacgatctatcaaggaaagcatttcgacgtctttgtttcttattctttcttgtttacggagaccacattcccccccaccctcaatttcaaattgccctctcttctcgtctgcaaatgctcatggtatagatatttcctttattattccctctaaactttctttgttcccgtccctgtcttttattatttctcctgtgtcatcagaaactgactgctggatcctgccaattagcctttgtctgtcagcaccagcctcagcctcccgaagagcgagtgtgcacggcgaggcggacaggccctatttcgtatgcagcacagtgtccccacacggagatatgccattactgacaaaagagcagtagatgggctcagattagctgctgacaaacttcctgtgtgtgtgtgtgcgtgtgtgtgtgtgtgtgtgcgcgcacccggtaggaggagatagtggggggtgggcaggacagggcaggaaagagaaccataccctggaacaccaaacagcaaatctaacttgcaaagtaacttatcaattctattccaaaataccaatcattctgaaatggtttccattataaatgtggtccatctgtactggtgggcacaaatgggcaggtcgcagccacaggaataatccacagatttctgcctcttggtcgcatctgctcggccctccactgtgaactgcttctctccttccccaggttaatatttctgggcagcttccagggtgaggcaagggaggcgctcaccttgggtacgaattgggcgccaaaaaactcagtagtcaaaacaattataatatctatgatttaattaaaaaataaaaatgaatgccaaaaatccatgatgaagaaaatattaaaatttcagataaagaaaggatcagtgttggtgatgtttccgtatgcatcgggctctaatatggctcggcacagtgctgtgactgatcctgtctttatatacagcatcatatatgtatgtgtatatatatatatatatcatatatatatgcattgagcgagtgtatgtgtgtgtatatatgtgtgtctgtgtgtatgacattttgtttgacatattttttggtcatttcaattttttaacaatatggcattaaaatatgacttatcttgattactgtgttccttggtggcctcttaacttctgctccaaagtgagttctccattgacctcaccctggtctgggccctgaggctctcccacacgggcttacatgaaattctgctcctgtcaggggcctccctctggctaataccattgacctgcaaagcattcagagggcaccatgggacccaatgggcagacacagggcacagcccttccgactgggcgaatccaacttttgtaagggaatactgagaacttgcagcctcaagatgccaaggcaattgtattctgtggatgtgtaaggggctctcatgataataccctctgatagagaggcccccaggcagtctgctggtaccccatatcttaaaagagtccctggggctatggtatctccagtttttacttgcattttcccagttgtccattagacttgggggcaagagtccagtggggtgttggccagaaggcacatccaggagccccaccccatgttatattcagaatctccctttctcttaggcagctaaggtcattctcagtgtgtttgtttgtttttatttgctttttttttttttttttgagacagagtacttgctcttttgcccaggctggagtgcaatggtgggatctcagctcactgcaacctccacctcccaggttcaagtcattcttgtgcctcagcctcccgagtagctgggattattacagatacgtgccaccacacccagctaatttttgtatttctagtaaagacggggttttgtcatgttggccagattggtctcgaactcctggcctcaagcagtccacccaccttggcctctcaaagtgctgggattacaggcatgagccaccacgcctggccattctaagtgtgtttggatgccccttcccttaggttgcgttatctcccagggtcctcttcagacctacaggcaaacaggctccctgcaggctttgccatgcacagatcagacacactggtgccatcatcaccttcgtcactatccatccacatttattgaatgcaggtatgccatttctcttctaatcctcacaataaccctgtcagatgggaacagtgagttttgccttttgccagtgagaaaggcgagaacgcaaggagtgcatttcttggcatacactggctagtaaacaatgggcttagatttgaacccacatctatctgatgctagatacagcactcttaacttctactcagccttgcatttgccctgtaccatcccaggagtctcaagaaccaggaagcttttgcagagctgttttgctctattttgtgtgatgaaacattaccttttattctacaaatacaaagttgtattatgaaactttgaaataaacttgaaatgtttgtttcaaactatactccgttttctctctcccttaacacatgtgcatattcacacacacacgtacacacacacatgcacagacacattctcaaaagttctagtactctgaccttggttaaaatccagtccttggtcatacaggtgattaaggcagagacactgccctatgaggtactagagtctagtaacagaaggggacatcttatcagtgaaggttgttgggtgtaagcaacagaaatgaactctggtaatttagacaaaaggatgatttattacaagagtactggcttgctcaaagaatatcaggagagccagagactcaagctcagtggcaacataccagtctggttccaaaagccatagccctgcccatgtaattattttgcctctctgtagatgtatatttattgaataaatgccttaaatgaggactttgcaggaggaaatgcaattccttgtggagtctcctatgtgtatgtaaactacagaatcactattcatccagcttctttttgtggaaactattcccatgggagagtttggaaaagaggatatggggtgagaaataaactttattttctccttctaatctccttgcatcaccccatcctccctctctgacctcccctgccctatcaggaagctgaacaaaactaggtccttgagagtttcttccccctcaatacttggatagattctttgttatttagggttctccccagaagcagaacttgagataaagatttgagtacaagttgtttatttgggaggttgtaccaggaaatacccagaagaaggtggggaagtgagccagggaaggaaagttgagtcatcaagacagctaacgccatggaagactggagcttaatgtctcctggaaaactctggaagccagtggagaaaaatgcctcagagtttttctttctggggagggagggagttggggtatttatacaccaacattgtcagttgttgagggtagctcctagaggaccattaattcttggtacttctggactaccgtgcctatggcaaactggtctccagagaccacagaaatcccttaggcaaaaagatgcagatgctgctgatgttgcagtccagcatcaagcactcaggtgatcagggcatggccctgacagtgacatgcggatgtccctgggctaccgacttctcttccttagcagagagagctttgagtgtttccatccagcaaaagccttaagaacctccaaatcatccatctttgagtttcaatgtcaagaaaatattggaagaaaatattaatgcaaatctatgctttgtcaagagtagtgttttgttatttttcttgaactatcccagatacactatttcaaattaggaaaaggacagatttttttttcttgagcaatatcaactaaagagaggaggagggaaaagaaaaattcacttatcatggtttatttgtttccatgtgatgataaaaagattaagtcacacagcttttatttttccccaatgtttttctcttgccttctgctattagttgtgtttctatttattttaattagaatttagccttttattgaacctattttctttctgtggtatttttataagctgtgttcagcaattcacagtttctaaaacactagagatactttttttttttcggacaagatgatgcacatcatctgggcttggatctggtgggctagtattcatctcaaaggttatgttcatcgtagcaaatgggactaaattttattctttagaattattccagttccagtacctgaacacttaactttaaaatttttttactattatattcattgggtatttgtagtgtattctatatactagctggtaatatcaccaacaccaacagtatctagtgttagatgttgttgtactgtttccaagtgttagagtcctagctctgcctcttccagctatgctgtttgggtgctttgctttacctctcatcagtttctttacatgtcagcctataagtttttattttaaacagactttgtatatatagaatacttagtccaaagcctataacatagtaaaacatttgactcaggtaagcttttattacaaaacactggcatacacacactcattttatttaaatagaaatgatactgttggcttatgtgcacctaatcttgaattatcaagtgactaatgcatggtttgtgtgtgtatatatataacacacagagtcaataaacaagtgtatatgaaatatctgtgagtcatgttctcatctctatgcccgtggtcttaattttgaaatgtcaattacatcacagcttaatgggtgtacatagcagtgtgtctgaacgtcgtttggctttctcgatcaatattgacctaattttatccggggtggctctatttcccctccgtggtatgtgcacatctgcaaatcgtctcaaggaaatgaagttatagcaacatctagagaatgcagtatgatgatgattactcagaactcaatctctttcaccctgtgcctccctcacctgcattagccccatggctcacctctgtgggaatggggaatgaccctcttctttagctctctggtggtaaaaagggaaatgataacaggagtagctaacagttactgagaactcaccatgggcaagcacttctgtgtgaattcccttactctcctgtgtagccagagcctttattattgccatccacaggtgatggatgaagaggttgacatgagtgaacacccagtgacgttgaataaatacatggcagggccgagattgcagccccaatggtcagctctagggcttgccatttatacaaaatgaactttcagtttgggaataattttagatttgcagaaaagttgcacatatattatagtacaagcttactgttttagccattgctttttgctgttctttaagcctctaagattttaccaaatcatgtcaacatcaccaccagctcatctagcttctgaagcatagatcaatctaacctcaattagaggctccaattatccacatttaaggcgccatcagagaacacaatgcaaaatttcttctttcattcaacacataatgattgactgctctctatgtcagttacgtaccaagtggtgagcaactcagtccagctgtttgtccttatgggaggtagacattgtacacacacacacacacacacacacacacacacacacacacacacagagtcagctgagtataaatttacaagaaacagacattagagagcatgcaatagtggaggctgacctggtctgggggacacagggcaggaaaagatggtcaggaagtttcccaaggaggtgatgtttgagctgatacttacttcgagggtgagtgtgaaggaaaggatggaagtgtgggaggggaagactgttacaggcagacagaacatctcctacacagactctggcatctgccatcagcttgcctttaatgagtttctggctcagatatgtaaaaaaaaaagtcttcatttcttagaatgccttctaattctaccccccttgcaggcttcatctcctctgtgattttctcctaggcccactctctcctccccagaattaaccaccctatactatatcagaccactgtatgtacttctattattccatgtaaatactattttaattgctttcctagaaatacctgtcttctctactacattgattgctccttgagaaatatattttattcctattttatatctccaaataatgaatcaatagtatttattgagcaattcctatgcattaggcactttgctaaattttttcttgtaatattttatttatttcttaggtcaaacttgtagagttgtattattcattccctatcacccatttagccagcatttattgggcaccaaccattgtgtcgggcactgttctaaatcagccaatgaggtcctgctggtcaaatctggctctccatctgcttaggtaaataaaattttattggaacccagccatgctcatttgtttacatattgtctacggctggcttcatgctactacggctgggctgagtagttgcaacagagaatgtgtggcccactaagcctaaatatttactatctgggtttttttttttttttttttttttttgagacggagtctcgctgtcacccaggctggagtgcagtggcgtgatctcagctcactgcaagctccgcctcccaggtttgcgccattctcctgccttagcctcctgagtagctgggactacaggcgcccgccaccacgcctggctaaattttttttgtattgttagtagagacggggtttcaccgtgttagccaggatggtctccatctcctgacctcgtgatccacccgcctcagcctcccaaagtgctgggattataggcctgagccaccgcgcctggccactatctgggtttttacaggaaaaagtttgctgatctctgttctagatactgggggcacagcgtggaaaaaaaaaaaagacaaaaatctttgccctggagggcttgcacaatgcttgtgtcagagatggataacttcaacctgtgcaatagctgttctgggtttcctagcttctcttccagttaggtgtggccataggatggttctaaccaatagaacatgagtaggactaataaggaccatttccctgcctggcccatacaaatctcctgtatgtgttctttcatagctcttcctcttgcagggacatgaccatagtaagctggaagccacttcttgaagatggcagcacttatcctgctggccctgagtagcagtatggagccaagattctttctccccttaccacaggcataccaatctggaaccacttagtattgttgtatcagcaagaaatacatggcaattgtgtttgagccatttttatatttttaggtcaatttgtgccatcagctagattttctctaatgaatgcagttttattattatgtttgctctgtagctattagccccaattttaacatgtcttaatccaagtatattgtctctcatctgaagaccagagtgataggtggtcagggttgttgcgtgatatcaactatgacctggtttcttctctcttgcggttctgccatctcctagagcgttgcccttgacccagtggagctggcttcataagcagcaccttgtattccagcatgagaaaggggtgcacagcttgtttttaagttctactctttatttctgttcatactctcttggctagacacatgagtcacatggccacatttagctaaaaggggggctgagaaatgtactcttcagctccatggccatgtgcccagctacaatccacagacttctaccattaaaaggaagaaattgtcaggtgcggtggctcacgcctgtaatcccagcactttgggaggtgaggtgggtggatcacgaggtcaggagttcaagaccagcctggacaagatggtgaaaccccatctctactaaaaataacaaaaatcagctggacgtggtggcgggcgcctgtaatcctagctactcgggaggctgaggcagagaattgcttgcacctgggaggcagaggttgcagtgagccgagattgcgccactacactctagcctgggtgacagaatgagactgtctcaaaaaataaaaataaaaaaaatttaaaaaagaaagaaattgggaatgggtggtgggcacagttagttgcctttcatacacatgatgatgactcagaacttacagtccagagtaagttaagtcacttatagcaaaaataagcacttttttccctttatttttaaaaataaagacattgtatttagtttggcagtgtaatgaaaatagttgacagttatagcagcacactatgcgtaggagtctgggttttgtgttgtatatgtattagctcatttaagtctcctcacaccactacaagtaaagtgttattttaattcacattttatggatgaggaacctgagactgatagaggtaaagtgagttgcccagggtctaaaagttaggaagtgtcaggcctggatccaaagccagagagctgggccccagaatctgcttgcttgaatccatctggtagattgcttcatctctgaaatggggataaaatatgtactttagagctgggcatggtagcaagcatctatagtcccagctactctggaggctgaggcaggaggatcccttgagcccagtagtttgaggctgcagggcacaatgattgcacctgtgaatagccactgcacttcagcctgggcaacatagtgagaccctgtctctaaaataaataaatacatacacacactttatcaggataaagcatgagagaggacgcaaagtagtttctgtctttatttttgtaatttttaaacacaggaacggaaaaccaaacactgcatattctcactcataggtggtagttgaacagtgagaacacatggacacagggaggggaacgtcacacaccaggggctgtcagggggtggggggcaaggggagggaaagcattaggacaaatacctaatgtatgtggggcttaaaacctagatgacgggttgatgggtgcagcaaaccaccatggcacatgtgtacctatataacaaacctgcacattctgcacatgtatcccagaacttaaagtaaaataaaaaaaaagccataagttatattccaatatttaaataaattccagtgataggctataattaattaaatataaacttaaataatgtgaagtaatcataatctgaaataaagaattttcaaataaaaaactttagtcaattttaatatatggtagtcttttaattaatttttaaaaatatagaataaacagtagaattcccttttcattgctttgttgactccctgctagcaccttcactgcccaaataatactcatttcgccagaggagggggctggcaaatatgggccacagaccaaatctcttcccccaacatccacacctgtttttgtaaataaattttattgggacccagccacgatcatgcacttagttttgcttttgggctataagggcagagttgaatggttatgccagagagtggcccacaaaattgaaaaaattaactatctgtccttttatgttaaaagtttgccaacacttgcttcagagctaatcaatgttcaaattttatgtcttcaatttcataccttttctcatgtttttgcacatgtctgggtatgcacatatatatgtaattacaaaaatacatacctatacacacatatgtatgcatatgcacacatgcacacataatatttttagttaaatgaagtcatgctatataaatgatgtacataatgtaccttggagatttttccatatctgttcctataatgctactttgttattttctgtagcgtagatgtaccatcatttatttaatcattcccctactctacagatgaacataaagcttgtttccaatttctgtcaaccatcttgaatgagtagtcaaaatgtctttgaaaacccaattgtagccaccattcatttaatttgtaaaattttgagtcttttgcaggagggaggctaacttcattccatgttagagtttcttacacacagtaaacaggaccaaaaatatattctgcacttcgggtcttaattatgcattatacacttaattaaaattcacattgtcagtaaaaggtaaggactatattagattgtggttgttggcatcatgattaatatacatttaagctttaaaatctgttgttacattatggtagattttccagaaagaaacatgaagctttaaaatgcatttttaaaaagacagaaggagatatgaactcagtggaagaaatccagctcattctagagcagatgatagctatatataataaaaaatggagccaaagtctcaccttaatttgcgtgtagtttaaggcaggcaggttcttctctctctttctgagaattagaactgtataaaaccagaggatggatgaatgtgcaaggcatcaaactccaggataaaacctgattttctattttgctaaaccaaacactcaagttttactagtctttgtgtccgctttaggtgggagcactgttgttagtttcttcccaaagcttacctttccctttggtcacatttttctagttgtttttattttttgaccctaaagagtttccctttgttcagagacttgtctgtgggcttgatacgaagtttccactttgtttggtgtatttccatttataagccgtgtttttctcaccttctctgcttcacactcagtttatttccattaaagatcaagaaagtgactgaagagtctgttcacattttgaggtggcctcaattttactctactgttggctgggatccacctctctcactccccagctattgactctttattttctcttttctgtttcaacgtttggccatggagaatcgtaaaacctttacttttaaattgtaagtgttacctttgttcttttaattttgtcatctgcccttgttcttttgttctttgttttcagtattctgacttattgcatctctatgattatctttatgtcagaggcatttaaaccagagcgtcttcattttgaatcggggctgggtaaaataatactgagccctactgggctgcattccctgaaggttagacattctaagtcacaggataagataggaggttggcacaagatacaggtcataaagaccttgctgataaaacagtttacagcaaagaagctggccaaaacccaccaaaaccaagatggcgatgagaatgacctctggtcctcgtcactgctacactcccaccagcgccacgatagtttacaaatgccatgccaacatcaggaagttaccctgtatggtctaaaaaggggaggcatgaataatccaccccttgtttagcatatcatcaagaaataaccataaaactgggcaaccagcagccctcagggctgctttgccaatggcatagccatatctttattccttgactttcttaataaacttgctttcactttactgtatggattcaccttgaattctttcttgcatgagatccaagaaccctctcttggggtctggatagggacccctttccagtaacatttatgccttggacaattttgaggtacatatgaaatatctggatagaaagtgcaagttttctgctaatataacccttctttcttagtaattggacccacaaaggttatccaggcacatgagaataacatgacaaaccccagcattttttgtgtgtctgggtgtgactatgtgcctaatttctggccagagtggtttaagtggaagtgttctttgcaactgtttgggggcctctttgtgtagagaggccacttgctactccctggctggaatgtggttgggtggttggctgtagaacgcctcactgggacctgatgtggaggccacatgttggccttggtagacttgataactagagacacagtgagtaacacgggcttctcagaacatgctgggagataaacaccaacagcacccaagaccagaaaatgccaccagatgctactagagagcaaagtatagtgacaggccagactctgctttctaacatgattattttccaaaatgtcttggtccttggacgcttaccaaaaaagaaggaaggagtttgtgactgtgtgtatgtgtgtgtgtgcagaatcctaaattggttgtgtgtttaactcagaatgatggcacttacctggaagtgactaaattttctgccattaggtagatggagggcttgacataaaaacagtttaagtggagttacagaagaattttaaaagattttatttcttgcacactcaagtttgtcttctgtgacaatcatagccacgatgggagtctgggcttaagaaggcagctgggaattggggctgaggtttaagcacggcaggaacactgtcagatttgtgcttccttccgaagtctgtttttcagggaggttgtggccacgtgatggtcacggttgctttcatcctctcctggagactctcagctgtcctacatatgtcactgcatttttgcagagtcagatggtcttttctgaattattttctattgtcatcatttgtgatctctgctatagccctgtctttatatatttgcttcaaaataggcccccagtccatttttggagagagtacttagatttgttcagtcaaatttcagaactgcaagtggctcagtcagtccaatgacaaagaacgcccccccgccacccactgccaaaatggaacatgagttttgcttcagaaatgaatacataaaatatgttaccttttcatccatcttctctcaattttatttgttgctaaagtgatattatacagatattgaaagactttttaaaataagaaaaaaaaacccataacaatgatctcatttaaaatttttggttgaaagtgacaaaaactgaattggaacaagctcagatggagaaaaaacacacgagcttgagtcacagaaaaatccaggaacagaattacttttagatatcacttcatctgagactcaaacaatgctcaagtagaataatcatttcttcatttcttagatctgtttcccaatgtgtgggcatcattcttcagcaggaccaatgcctgggggtgcaaaatggccatgagaaacttttagcctcctatgctttgatttcagtaaactcagcagcctgaggttctctctctcttaatattaaaatcaaagcaaaacaaggaagtgagtttcatattggtctgcttgtgctcatgctcctgtctgaacagattaccatggccaagacagtggaatgaccagggtggtgggggcagggggcggtcaggtctcgggtatgtgccctactttggatctaagggtgggttaatttcttggactcagtgagttaaagatgatggacaagtagttctctactccctcctacccaatcagggtggcattcccagaagaataaatcaatagacaaaaatagcagagagccacccaactgataatcccaatccccaaagagatgagagcttccattcttctgttcccattcgtccatgttcataaagatcacacccgtatatgcttataattataatatagaatagatcagagaacagcaaactacagcccaggagccaaatttggcccatcacttactgctgtaaataaagttttattggaacgtggctgtgtcgattcactcacatgccgtctatagaaaacatcatgctacaacagcagttcattagttccaatagatactgtttggttcgtgacatcgaaaagtatttactgttttgcccttcacagagaaaatttaccatccctgggtatatattagaattagtattgtggtttttaaaaattaacagtttatttgtacaacctcacatgttttcagaggcttaataattatgatctgttttgtctacagaatacttctgttgggttgaatgactctctgcccccaggtaaggagaaatactagaggtttcttacaggaaccccctcctttcatgcatgtaagcaaaatgtagaggctccttttaagcacttgctctgtggtcccctaagcttaactctgctgaagcccttatcaaactgtaattgtattttccttacataaaatatccctagggcaaggacaatgattcattaagaacacatccataatatctaacgcaatgtcaggcattctgttgtgcacatatctactgcctgtaaattcacaacttctgctgctggtggtgcaaactgaatcatccactaccctagttaaaactttccatggaagaaggataagactgaaaatccttaacgtggtataccaggtcccgtgtgatgtggccttgactttctcctgtagccttctgctttggctttcttgctccagccattctggtctattttcctttcctccaatgccccatgctccttcctgcctcagggcctttgcacaggctagcctctctttctggccctctctcatgcatactttaagggaatagggtgagggaccaataccaaggcagcccatgtgtaattctccttgttacatttatatcacattattcctctccattatttcatccccaaactttcatacaaaggaatacactcaatgaccatttatgtgttaccatgtgctgggaactgttttagaatcaggaatagtgcaacagcgaaccagacaggtgtagccctgaccacatggagcttataatcttgcagagctatcaggcaagtaatcaccagatataatgcagagtgaccagtggagttggaggaaaagggaagcagtacaagagtgtagatgagggaaacttcccaggttcgaagctcagggaagactctcaaagcccatgctgttaaagacaacaccgaaggccaggaagtgcgggatggaagagcttaccaagagcctagtgagggacagatcccactggaggccaggtgaggcccctggtgctgtgtctcagatcgggggtgaggcaagtcagctgcaggccgactcagtgtgttccggtgttctgaggaaatgctctgctccaagccatatctctttcttaccttcacttctcagaggctgtggtttccttttgttcttcttactatttcaagctttcattacaaccctgtggcttggttacaagctagggttggggtttgaattcatgttctttttttttttttttttttttttgatacggagtctcgctctgtcacccaggctggagttcagtggtgcaatctcggctcactgcaacctccgcttcaagcgattctcctgcctctgcctcccgaatagctgggattacaggtacctgccaccacaccagactaagttttatatatatttatattttttggtagagatggggtttcaccatgttggccaggctggtgtcaaactcctgacctcaagtaatctgcccaccttggtctcccagagtggtgggattataggcgtgagccactgtgcctggcccgaattcatgtcttatgcttctttttgcaaacaatgacttaggtcaggggttggctcactctttctgtaagagccagagttaatatgttaagctttgtaagccctgcaagtctctgtcatgattacttaactctgccacatgaaggaagccaagggcagcgggtaaatgaatggatgtggctatgttctaataaaactttatttagaaaaataggtggtggggcgaatttggccagagagctatggtttgctgactcctgacttagatgatcagcaatgtctttaaatatgtcttgacttactattaggaaataaaaaaaaatcttttatattaagatttttcaaattgtgtactgtagtcccttgggtttttggtggagttgcataaaagccttcagagctattggaaggatgagggccaaagagaaggaggcctcacccaagggcactgggcacgtttgtgaacctggtatttccagacactgagttctagaatcagactttcttgacctgtggatgcatagaaatgcccatgtgtggtggtacagaaatggtgatttttttcccaccagaaaattttttatgaataatcatttttatttctaaagaataaagtcctcaaacagttgtcttctagtccagagaagtaaaagatcagaatttagtttagtttagccttgacttgtttgcttctagagaaaatgatggctcctatgatgactcaacttacttttcagtcgaaccaacctagtgatgaggtttggagtagggccaatttttattttctttttccatacaagatgttattcgaatgaccttctttttggggcctttatcatgtcctatcccacggcacttcttccccatttttgcaaagattagtggtaaagattagtggaaaagattctctttttcctcctggctgtctcccactcattcttccagtccctgactcacaagcccttccccgacttcacattctaaactggtggcaatctttcattattcttctccctctgcctctcccttcccctcccccacccttctgctttttctgcttctgcttctgctgcttctccttctccttccccttccccttcttctttcttctttcttcttttttcttcttcgcccagtctcattcggtcacccaggctggagtgcagtggcacaatctcggctcattgcaaactctgcctcctgggttctagtgattctcatgcctcagcctcccaagtagctgggatacaggtgtgcgccacaacgcctggctaatttttgtatttttagtaaagacggggttttgccatattgggcaggatggtctcgaactcttgaaatcaggtgatccacccacctctgcctctcaaagtgctgggattacaggcatgagccacagcacctggcctcattattcttttgctttgccttgtgttatcacttgatgtgtgagagtgtttgttctgtatccatcttccccattagagggtaagccatacacaggcaaggaccacattcattgggttcaccactgcattgctgatgttggatgcatagccaatgctaaatgaatgagcatttgtgttgtttcatggcatggagttgtagataaatgtgaggggtatgaatgacttagaggaacaattccacagtaatgccagttaggaacaatttctgctacaaataacagactattgacagatagttactttgaaagaagctgttggagtcttgcctaatttcaataccctctgatcaccgaggccccacacacagtgttctcctgcaggtcaccggcttattactcaaagcacctggggttctctgcttcatggattttgttcgctgtttgagcatgcttgttgggttgggtgggaaattctaggtagttagcactctcagtagcagtcctcaacaaataacagatgtacgttggtaggtacatatcccagttctcttgcccctcagtggggcaatactgaagcatatccccagcagttctgggccttggttgcccacaggggttacttcctcattaacatactctgtatgggtttccttcttgttcctgggtgctgtctgggatcacctcccttataaatgaattgcaccaaatgcccgtctcaggctctgcttctgaagaacctcaatgtaaaatatttacttaataagaagcttggaggtaggtagtactagagatggttaactcagcagctcagcaaggctgtcaagcacccagacttttctatccttccagtttttctgcctcagcagtggacatttaggctttattcaggtcttttcatggttcaagatggctgctgccgctttggataatgcaccttcacttgtgcatgaaaagttggaagagctgggtgggcctaagagtggaggagcagcaagtaaaaagggtctttcctcacatgcgtctttccctgaaacaaggagaaaactctcagaagtgactcctttatgtctcgttgactagaactgggccctatgggccagcacttgctgcggaagaggttgggaagggaataactggtcttttcaggctttggagtgggaggtgggttagggcattgggaacggatatgcatagccacaacattaactagagcagagcgcatttgtctctttttaaacagattgatagcatagggtggaaagaccactaatctatttgtccgttaaaagagggaatacacaaccaaaagtgcctccagaaaggaattttaatctgttcatggctggaaagtttaaattttacagcaaaagtttgaaatctctgtaaacgacagagatgaaaaggtcggcatttaaatctgtttccttaacagatggctcccagagtgagctgagatcggaattcactttctgggctcagcctttctccataaagctggtcgtgcagtttatgacatcagcagagccccagagtgaattacggctcatccttgtgttcattctggtgccatctattatgctactgtgtgtgatgttgattaggaaggtgtctttgatagctcagtggaggaaaaagtgctcttgttagagggtcgaattacaataatggttaaagacaaaggtacatcaaggggggctgggacactaacagccttttacatttttgtctgtctgtgtgtgagaagaaagaataagattatatcaagtcactaaaaaatacactccatatttagggacaaagacattcctattttctcactgtcctaattgagctctatacatctccttaataaagtcctgccatttacctaatgccaggtgttataaatacatttaatcaatacttctgagtcttgacaaaagagccatctatcactcttgacctctcaaagtctaagtaataggtcagagtttattacaataaaaccaaaggggtgatcaaaatgtattttctccattggaattttattgggttaggtattgcttgaaataagccattagttgtggctggaacattttttgggtagcaaaattctcataagggtgatttttgtattgctattatttgacttggaagtgttaaaaagatttgaataattgatgccaagaagcttcttccatagaacatactcatatttgagcaattgagattcctcctgagtctttgaggtatatcaggggcctggaccttttgcaaattttttatatcagagttttaaagggtgggaacagggatacctaaatttttgaaattctgatgcatgtcaaagtgccatattactgccatggagcttttaaaaagaacataatatcctctgtgcatttaccagttgctgggctaggccttagggtgagacctgtccaatatggtagccaccagccatatgaggctatttaacttttaatttccattaattaaaatgaaataaaataaaaaaattgttcctcctttgcattaggtacatttcaagtgttcagtagctacagatggctagtagctaacatattggactgcaaagatacagaacatttccatcatcacagaaaattctactggacagctctggattagacaataaacaagacagacatgatttctgccctaatggagaaaatagaccagccctctgcctccccccatccactcccaactgccaataaatggacaaatcaacaattaagaattttgttttatgaggaaagccaaggtctgtgatcagggctggctatgtggggcccagtgaaaaatgagaatgcatgaaccctcgttcaaaaaaaacttaagaattttaaatggctatagccaaacattaaagaagtccggggtccttctgagcacaagttgcacactcaatctggctgaaacagactaaagccaaggggcctggagaccttttatagttaaggatgtcacaaatgcttctgctagaaagtgacaaataatacgaggtgaaaaagatgagagaaaatgcaaagtgtgtaggagaagattttaggcaaagagaacagcacaaaggacccaggagggaaagaggatggcatattcaagaacctaaaagcattccagagtggtagagggaggaaagaatagcggaggtcaaggctgagatgatggtcagggccagggccagtggttgggtcctcgtagctgatggttgtgtagggttgtgtagtcatccccacaccccgttacagactcactggtgaggcccagcatatggctttatcttcaggtttcatttgtgaggttgagagcatctctaactcgtaaggaattcatgcacgtcagaatgaaattctgctttttattttttaagacaaggagggagaggcacaggagatgatttgctttgattcacggtctggtgcaggagcaggttaaggaagtcggggagaatgagcagggttctgtgcacgcacgtggcatttctaagcccctgcagatgcagggctgggcgggaagattcctgtctctctcatgtgtcatagggaagcattggcttgcacgtgttacttcccaaaaaggtgtttcatccatagaaatgctgattctctggcttcccaatgctatatttagaaatgacatttacatttccacagatcaacagctcctgtttggatacagttccaggagctttgctgtgacagtgaatgtgctggcttttattctcccctgtttccctttcttagctgtgggcaattagcaaagttaggaggcatttgtcatttggtagatgaaaataattaaatatgataaattcatatattttgaaagaggtcaaaatgaaccagtatctgtatcttgactttcaaaaaggcttgggggaaaatttattctattttctgtctcattcatttaaagaatatctgtatagattttagctaaagcatcccttaaacccccaaatcctcccaccctcccatgttattttatttatttatttttgttaattttgaatctgaaagtttctgataccttagtagcttatttattgatagttcatatccatagagaaatgtcttttattctgcagtaaaccattatttcattgagggtttatacctgtggtatgtgtgtgcatattattttgtgcctgatggagttcaaatattctaagtattactctgacatatttccatcttagcaaaattattctcacagctattgataacaaaggaaaggaccaaatatcttatttccttgtcaagagggtggaaaaaatggaaatagtaaaaataaccattggctgccatcaatctacaggattatggtctacctttggtaataacattctacttagagcctcctgaaacctgatcaagggaccccataaaattgtgagcacatgtcaccattagagggcagtgtgcactctctccaagagcccataaaaattatgtttcctgccatagctaaaaggatttgtctggcaaagggcaaacccattaggcataaacattcagcattttttgctgttgcctgtcataatgaaaacaatgatttgaaagttctgattaaacctgcaagattttctatctagtgtatgtcttcaagcatatacttttcaaacttacttcttttgatgttcagctgtgctagaaacgtgagttagacctggcacaactttttcaggactttggtagggaaagctcactttaatctcagtgacgaagctctccttggaatatagatggccattaagtaacaggaaagtctttatcaaaacaacagcaaccaaagttagttaaatttttttttgttgttgttgtttttagataggatctcatactgttgccaggctggagtgtagcagtacaatcatagctcactgcaacctcctgggctcaagggggatcctcctgcctcagcctcctgagtagctacgactacaaacatgggccaccacgcctggctaatttttacattttttgtagagatgaggtttcactacgttgcccaggctggtcttgaactcctgagctcaagtgatctttctgccttggcctcccaaagtgctgggaatacaggcatgagccaccatgccccacccccagaagattaaaaaaaagtcactctaaactccaaaatgtgtccaaaagtcctcacccaccaaaacctaatacaaacatgaagaattagtgaatattttttcagtcctgttttttctgaggagcaagaaaaagaaatctttgtttatatcaccgttggtaggccagtaaacaaaggctagagaagacatttgtataaacttgagaatttgcatttaaaacatgatctacagttactttgtagaatatcagaatttgattcatcagtgggcataaaatcatcgcgttggcggtagacctggaattggcaaaattatgattgcgtcaacgtgccagcccacatcggcttcttgttcaggtgtgagattgtaaaggaagggtctgctagactcgtctttcaaaaaattcagcaaataaattgtttgctttacaactgccagccgcagttgcctctggcagcgttgtttttctgctgactgcgacagattgagctcttctgccggaatttctctagagggcagtaaggattcgaggctctttccctatttttctgaaatgacggatcatcgttgtgcagctgcaaaggttaggtagtgcagcacacgctctggtgctggggagagtggccgaactctccagaaaggagcctccttggcttcctggtacgtcctgcaagccgatattttgtgataacctgcagaaaatcatttcctctcttccaaaaggaaatggaaggatttattaatagagtacagctatagatacaacatatatgtattaatggttgaccaaggatttaaaaattaaatggctcctgggatcctgcgttggaggctgggtaaagtcaacaatggaatatctgggaaaaccaaacagaatagttgggaaagagaaatctgtgtaatcctgtggtcctcaaccaggaacagttttgctcccaggggacctttaaagacatttttgattgttacaactgcgggcgggggtggaggtggtggggggcctgtagcatcaattgagtaaaaacgaggcacgctactaaacatcccataataaaaaatacagccccacaacaaagaattattcggcctcaaatatcaatagtgcccaggctgagaaatcccgatgcaagccatcaggtagccaggaagaaaacgtgaaaatagattttagaaagctacagaaaatttagtttttgttttcagtttcttggactctgaagatgaaaagccagaatgtctgtgatattcaggatcgtttttcgtgtgcttcctgcatcaaagcatgaaaattgtgggacccaggtgaatttgaacccactgggcaagaggagctgttgaggtgaaatggcagagtggcccctcacaggttccagcaggtggggaggacccttctgtgctgctgggaatttggggctgggcattgctggactctgtgccattccctagttgcagggccactagatgcctgactttctctttctctttctctttttctctttctttcttttcttttcttttctttctttctttctttctttctttctttctttctttctttctttctttctttctttctctctttctttttctttctttctttctctttccttccttccttccttccttctttctcttttttctttctctctctctttctttttctttctttatctctttctctctttctttttatatatattttattatactttaagttctagggtacatgtgcacaacgtgcaggtttgttacatatgtatacatgtaccatgttcgtgtgctgcacccattaacttgtcatttaccaaacaccgcaagttctcactcataggtgggaattgaacaatgagaactccctttctttctttctttttctttctttctttctttctttctttctttctttctttctttctttctttctttctctctctctctctctctctctctctctctgtctctctctctctttctttctttctgctgcaggttcagcatggaaatgctgatatgctaatgtaaaatcattctctcgggaaacagagagattgggatcaaaatggggtcttttgcaaatagcagactttggttggatattttgaagctctatggctctggttctcaaccaggggtgattttgtccccagggggacatttgatgatgtgtggagacatttttggttgtcacgactgagtgggagtgctactggcatctagtgggtagaagccagggattctgctatagatcctgcaatgcacaggacagcctgcccccgtgccccggtacagaactatggggccagcaatctcaatagtggcaaggttaagaaagcttactctatggtttttggctttgcataatacattcttattccctaccaattctaggatcaaaagcgtccacagttatgaaaatttcctgttctccaatattccacagatgacttgctggtaggagaaaagagtgagaattgcatccactgtgtttgtaaggcagagtcgtgtatttattcgcattgaaaggaacatctctgtgcccagaagcagacatgtaggcagtgaaagcaggttgaggacatgcaattgcttcatgtggatatgaatttttttttcctcagtgaaccgaagtgagcaggtgtaaaatgatcttggaaactcaattaatttttcaaaggcccaggcacagggccagtctttgcaagaactggaaggtgatatggtttcatagaaatatctagaaaagggtggatgtgataaactatcaggatcagacaggtaaaataaaggcagcgtgggtgaggattgcaaatcttggagtctgaagttggaatgaaggaggtttgagtctcagctccattatttactagctccaggatttggggcaagccacttcacttctctcaactatagcttttgcatctgtgaaatggggataatcgtactctttaatttcaattaaattagggcaacaaatgtaataatgtattaaatagctcttcagagttcttggtatatagtaagtgcttaataaatactagatactttattattattatcataatcaccactgttgccattattattttcaatgtttcagaatctccagtggtgcagaatcaagggtttatgtgtccaaaggcttaccttattccttgccccccttttttttaaaatctgagaaagcagaattttaattgtatgagtttttccctagtgtctcgtgtagcttttctcatattctgaagtttagtctacataatggaaacattttaaaacattaggcaaaatataattgttttgattatttgcctatgcaaatataaaaagatactttctttttgctgtttaggttaaagtgatcaggaatttaataatgtaggaacgagaaaaaacttttctgagaggtggcactaggaatttttaaaggcatgaaaattgtctttatttggggaaatacaaagttttagatgtacttggggcagaatgtgagaccccagaaatcttaaagttgttgagaaaagagggttacaggaaagagcaaaagttttctgcatgagacaaagagaagagtttgcttatttgatttgggaagggagggtgggcagatgagagggaaaaggtggagggagaaggtgggcagggctaaggatagacatgtgacacaggcctggctaatcagaggagagcatacccccagcttcaaagaaggaccgtgggatgaatgtgcagacccaagtagtgagaattctgggacgttaactggagccagtgggagcataatgttctctctgctggacaggagctgtaaggatgtttatctggagcttctggcagccattttgtcaccatgaggcatgaacctgaatgagaatggagctaactcaggaggaagcagaactcagagctggggaaagactaagtcctgatgacattggttgaactcctagatggcattggttgaacccagagcccatctacctaaggccttgcgtttacataggccaattatcttttgtgggtaagcctgtttgagttggtatttctgtcactggcaaccaaaggaatacctgtgatatagagaggaccccggctaataaacacacaggtaagaacaactgaggtctgactctgaagtctagtctacctgacttcaaggcagttattctatgacattaggagataagagagcttagattcacttttctcatctgtaaaatgggaaggttgggagtaaatcggtcattcccagcctgaagtattcagactttcaggtttcttgcaattaaaaatgtgaaccctaagacaattttaattttccaaactcctgaattgaaactctagatttctgtagtatggctactccaaattaattggaatattacatttcttcacttttttttcttgggacttacaactcattgaggaaatagtactcagttactgctaatcagaagatccagtgtgcagagctgctattataattaattttaaaagtgagaatataaataattattttagaaatatattttagtagatacaaacttttgagaatattggggtcacttaaaaatgggtcattggggtaaaaagattgggaaaccaaggtgtaaatgtaaatgatataacattttcagtaatccaatctgaccgttaggatttaaaatccgtgttcttttatttatttgtcccagactgtaattagtgggcatgagttgtctttatttttatgcaaaaagaattcatcaaaatactcttccatcttaaaatttttttaatattaatcacttactgattctttgaacaaatcactatgtgactgcattcattcattcagccccaatttattacatggctactgtgtatcagccactgttctaggtactgggaattaaaaaacagaaaaccaaaagagaaatagttctaactcagggataggcaacaataaaatgaaaaatcaaataggtagtatgtgagatggcaatgcatgctgtgaagaaaatagaaaataaagcaggaaaggggagagagagttctgggcaggataccacttcaaactgggtggccaagggtgccttagtgatcaggggacttctgaaaagagatttaaagaaggtgacagaagggccatgcaaatacctggggaaagggtcttccaggcacaggaagtggcaggtgcaaagttcctgaagcagcatgtgcctgccatattcaagaattagctgggaaaccagtgtggctagagtggggtgagagagaagatcagccaaaggcaatgaggtcagacaaactgtgggtgagaaggggaacgtccctggggccccgtggggcagggtttcccaaccttgacactgttgacttttggggccagaccattctttgttggaggggctttgtcgtgcgttgaaagatgtttaacatcattacggctatacctgctagatgtgagtagcaccgctcctcctgcccccaagtgatgacaaccaaaatgtctccagacaatgccaaatgtcctctggggagtacagtcacagccagttgagaaccatggctgtaggagcctcatgaggacttggtttttagcctgagtgcagtgagagacctgagagagttttgagttcaggagccacactccagcatgggttggtctgcatggggtcagtaagggatctaagtgcagaagccaagggccagcaaggaggtgtctgtggaatcctggcaggaggaaacactgaagcctctgtttttgaggagccaggagaagggaaaaggactgaacagcgagggcttgttcagggtgatgttaaaaaaatacttaggggtcatgtggcaggggccctgtgcagtcagaaaggctgctggcaggataaaggacagaggcgtgtccctggcattgctgtaggaacatcatcggggcagctgtactgaggcagtcgtgactgctcgtattctgagctactttacttttttttttttttatgccacagtccgagcctgatgtagcaaaggaagcagcctcttgtttgtatcaggtgatagagagccaactttaatacggataagacgaagttcctaggccaatgcaggtagcaggcatataggacaaaaactgcaccctaggaaacatctacgtggagaggcagagcaactttctcatgggcacacaggcagagtatttctgacctcagaaaacccacactatgtgtcccagctcatgatgtttggtggataaaggcaggggctagcttcccattcattcagtcagccattcaacaaaccttcactgagggcctctcaggaagaagggtctgcctaggcttggaggttaatcacacaggaactttgtctttaagaagactgtggatgtatgggctgacccaggagtgtccacgtgtcaagcacatcttcctgctatttattattagtactccctttaagccatgtgtctggtcatgccacatctgcacaaaaccctcttggctcctcttctcacttcgagcaaatacccaggtccacactatactttataaggcccaacccagagggtggcaactttttcctgtaaagggccagagagtaactatgttctgctttggaggccatgaagtctgtcttgcaactactcatctctgccgttataatttgaaagcggccatggataatatataaatagataagcatggtcgtggtccaattaaactttatttattgatggtgaaatttaactttcacatatttttgtgtaataaaatactactctttttggaagattgaaaaaaaaattaaaaaatgtaaacgtcatgcttagctcctgggccacacaaaaacaggcagcaggatgcatttgccctctctgccctcatatagaacatgacaaaagtgggggccagtcgcagtggctcacgcctgtaatcccagcactttgggaggccaaggcaggtggatcacttgagtttaggagttcgagaccagcctaccaacatggtgaaaccctgtctctactaaaaatacaaaaattagctgggcattttggtgcatgcctgtaatcccagctactcgggaggccgaggcaggagaatcacttgaaccccgaaggtggaggttgtagtgagatgggatcgtaccactgcactccagcctgggcgacagagcaagactctgtcaaaaaaaaaaaaaccatcctctccaaaaatccccataaactcccacttttctgtctttaagatgaaggacaccatgctaggcatttaggacttggtttggttgacactatgggaattaatctgccaatctctgaacttcttgaccacaacatctctgttgctacacctcagccctgttgtttgaaagcagccatgaacaaggcataaacgaatgggtgtggctctgttccaataaaactttacttataaaaccaggcagatgtggcccaccggtcctagtttgctgactactgccatataagatcaaaatatgctcattcccccttctagtgtcatcttccaccttgtattagtccattcttgcattgctataaagaaatactgaaggccgggtgtggtggctcatgcctgtaatcccagcactttggaaggccaaggcgggtgggttacctgaggtcaggagtttgagaccagcctggccaacatggtgaaactcggtctctactaaaaatacacagaacaattagctgtgcatggtggtgtgcacctgtaatcccagctactcaggaggctgaggcagcagagttgcttgaacctgggaggttgcaatgagctaagattgcaccactgcactccatcctgggtgacagaatgagactccatctcaaaaaaaaaatattaacaaaatattatatattttatgtactaagcctttcaaatctgatgtatattctgtacttgcagtgtttctagatttttggactagtcacctgtcagatcctcactggccatggtgactaccatattggacagcacaggactatagagtttgagcttttgaaggacaaggacaggttgatgtcctggtgactgactcataagcatttcttcagtggtggctaactacctatctttggccaaccttccttgtgtttcagtctgccaaagttttgggataaaccatcactgtcaaaatttattggtactcaagggaaaatcaagctttttgtggcatcacacaacatcataaattaaaacatatgctttaaaaaattatgatgttacatcatgctttgaggtaatgtaatgtgacagattgtaatttttatttttgtaagatttcctcagtgtaaagcaggaagtggatttgagaaggtttgcagtacccaggacctctgaatcaggaccacatttccaggctgccacagtgttggtgcttggtacatcaggcagcggtctctgctgggtccttagtcttcttttctgtgaccctcctgtggttcatttggattctatgtttatcctaagaatctcccagggatcaagagggttctttgcaacctaattcactctactgggctatatgattttggaactagagtttccattggtttatgtagaatgactggcaaattttgtctcaaatgcaaattagattggtttttaatggttgtctggggtcttaatgctaagaaaacttctgaggatgcctctgcattcatgtaagagatgacgttagtcaaccagcagtgtttgccatgggcttgcaaaggggtagaggccgtttatacaatatgtatttgaccatcctgacctaagtgtctgtttcttgcttcttggatgggcacgtaatgggagtttctttaattgggctaggaacagtgtcaaaggaagggcaggggtcctatacatgggttgaacttagtggccagtttacccaaggcagtttgggtgagtgaaaggccccagctgtggtcagtgcctagcagagcttgttgtatgggaagcaatgcctagtgctaggttcaaatgttgaggccaggataaacgttaagtctggaagccagcaggaataagggaagactagaataagttatataaaataacaggagtaagcaattctgactggaggaaagctggcaaagcaatgggtttcatctcatggtaatccaaattgcttagtagtgtctgccaagagctctgtgttggagggcttctggattgtgccagggactggggaggcaggaagtcatgattgattggtaatgtctgccatgagtgtgggagctacgcaggacagtacacatgctacatatttgcaatccctgatttagaggcatggttatgctggagttcacacagagagagagagagaggcatggttgattggtaatgtctgccatggattttggagttatgcaggatggcacacatgctacacatttgcaatccctgatttagaatcatggttacagtgatggcttaagaaaattccctggttgtctttgacatacgcatattttgttttctcacctaatatttattttttcacttaataattgaccattagttgtctcgatctgtgttggggtttagtcatattcattgaactataataaaatgggtctccaaagaacacaagttagacagtggtaagtgccattgagtaagtggaggaactggggggttagcaatgggttcatgaaggatgtggcatttgaatggggtattggagactggaaggatcttgaacatgtggggacgagggacataacatcagtgtggagggaacagcacaggctaaggagtggtagctggaaagcatgagtggtttggaggcatagcaaggaggtggattttgcaggagcaaaatgtactagaaagcctagggagagagaagactgagattgaatgatacccactggggtatcctcccgtgggctgcaactgacaaaataaagaacttggacttaaccacctgaccatatggagcttagttgcttctatagtgcagcttgaaaaggcaccagataggcgcctcgaccacctgacatcccatcatagctgaagtcctcagagcctaaaaaaaactgtgattttcaagagctcccaaatgggtgacaaggtagaaataagaatgatagaatgctcctcacccttcccacatttcttgcctgctagaaagactctggcttggcctgtggctatctcttccctttttctgccattcaaagaggatctgtgtccctcagatctttgcagtggtgaataaagagaagaaaagaggaggcaggtaagaagaggtgtttgggtagattgagcatttcaggacgctttgaggtaagacactgacctatgtgaggcagtggtggagagaggaaaaaaaacaggtccaaataaagaattggagaaattctgaaatcacttatttgcttgtgtgaaacagtccctcccactctattttttgtttttgtatatgatacaggttcttactctgtcgcctaggctgaagtgcagtggcacaatcacagcttcctgcagccttgacctctgggctcaggtgagcctcccacctcagcataccaagtagctggggactacaggctcatgccaccatgcctacctgagtttttttttttttttttttttttttttgtagaaacgggattttgccatgttgcccagactgatctcaaactcctgggctcaagtgatctacccacctcagcctcccaaactgctaggattataggcttgagccaccgtgcctggcccaacatgttcctttaattgtgatacagatagggactttacaggactggtcctgggtcgcagctttgtaaacattcctcgtggaagttgccttgggtcatgctttagtttctcatcaacccataggaagactcgtgtaggagttgggttctaaagtcatcactgaggggaacattctcatggaatcaaacaacgccctcaccaagtccccaaaccataacataaaaatgcaacagctcttagtaagtccacgtgaagcaggttttcctccagtgttagtgtggttcatagcttctttggtggaactccagatgaaagagttggcttgcatttaggggctgtgctgtatgaaaaatttgcatcttttaacacaaaatctatgctctgcaaggtgagatgctcaccctgtgggagggatgtgaagacggaggagtacggagggaagcacagatttatgcctcacccttcgcacctgttctggggcacgtgcttcacagaggagaactgggagcaaaattaccagcatgccatgtttttttccctttctgccactctctcagcctatcattgatttatgcatgtcactccatggtgtggcggtatcatgaacacacaggtatggcttcatgggactgtgacttgggatggggtcaggaagtcctcactgcaggctgcccacagcctatctggttagcaaagagaagagcacacggattgatattggtggttaggggagagaacttacctggagtttgcatatattctgtactcctggtactggttcctagattctcaataaatacagccgtgggatgcagacagcacgacagatgctgaggcactacacgtgtaccctctctctggaagccagctaataatttcttattagcaagaacaagtaaacaagattgctgttctaccagaagcctattgaatatgataaaggacactctcctacctcctcccccacgctcaggttgaagttggagaccaaatcgtgtacctcgctctcctggcacaggtatgtgacattcaggaaactgcaaaacctctgcatgaccacggagaaagagggactgatctggctctcagaacctagggatgaatgggtgaaatgtgctcttcattggcaaagccattgggatgacccattgttttcctgccaaatttgatgtgactggttgggaggtaactgggaagtttttcctgtattctacctctttctatctattctctcatgttactccagcctttttttttaaccttttgagttcccttctctcttactttttcctcttgagctgcctttgtgtggctgccaagagggagacttgagttttccatgcaagaggagggcgacctgctgccttaaatgggggtgtctgtgctgagtttcttgacagaggagcccattagaggcatatgacaggtatctcccctcccaccatcacatcaggctatgccacgaggcccacatgatcggcaggaggtacccatagaagctgttttttctggggagtagggagggcaggtgggagaactggaaaaaatgagcccacttgaccacatcttgatggcatggagagacaggagaaaactttttgttcttggaaatcttgactcccttaggtttcaaaagtttgcatcctggttaggctgaaacatctagacttttcctaaaaactctgttaatgtacttttttttttgtatccttggatttaggaaattgtgtccaatgagggatattaaaactgttaaaccacaagcaccagccagtcaggagagaaacccaggctgccagaacacatgctggaaatgaaccactggcatcgccttgccagagtgtagcagttgaatgtggccttaaatgcactcatgctgctagtgcatttggtatgcttttaatcacatagttgtcttagatagggactagtcgagtccatcacatgtacttttaatgtctatcaattaagcatatataaagcaaaggagaacaagagaaacaatttaataaagctagtgaatacactccccagtctatttaactctgtgctccagagggaatgtaggatgggaaatgagaatttgctgtttcttcagttggtctttgttcctgcatttcacccaaagactgagcagttccccctatctgctgcggttctaacactgaaagaggtatattggtcttctaacatggtccttaaatgtaagtaagctataatgtgaacttgaaaagcaaccatctgtttcaatattgtaggaaaaatggtctgtgatgggtttactgggagatgggttgtgagtagttgacatgacactctaaaaagataattttggccatttgtaaattgcacttcatgtgccgcctttagagctcaactcctgtgtaagttgccacttcactatgtttgcatcttgtacctggccaaccagtgcaccttcaatttagaaagtatcatgaagccgccttctaggaagatgaaagtcaatgtaaaaccatgcaaaaggatccccttcttaaagtcaccattgattttagagatttctaggcccaataagccccacattttatcatttcatctctttacactatagtaagcccagataatcttatatttcaaagggtttctagcattgtgtccatagagtagaaataatatagatgtgtgtttgacatctgaatcatccatttcacatcttccaaatacacctcttagtcccttaacatctgggttttccacttgccaaaaaaaaaaaaaaatccaaaattatgtaggagtttgaattagagtctcatccagataaattgtcttacagacctggaaggagaagaatgattttgttaaagttgcagaagaagggctataggtaaataagcattaatcttttatttgattttaaaactagtatcccatctgaattttagatcctaaagtagactccaaacagaatgtattaaaaaacaaagtcatatgtgtgctctgtttgctgaccaatattgtgcctttcagagttaaaaattatttattatttacctacatgataagaaattggataaaattccttcttttgtctcccaaatgtatttcatgacaaaaatatagtagtaattgcaaagagacaagaataaatttagtttctcaatactaagtggtgtactataaccagtattcaataaggcatgttgatttgatttaaattaaaaagagaaatgaataattagcatttcttgtattggtgacatatgtgaagaccaaaataaaatttttccatgaagttggataaaagtaaaactttcaaagacagttgtatgtatgtattttaaagtaatgggaccagcaatgttgcaaatacgatacatggactacacatctataatacataaattgttacctaatccctttaataataactaacacttaaacattacgtgctgcacatgtagcgacagtttttagcacaggcctacctcattttatggtacttggctttattgcactttgtagatatcacattttttacaaatgaaggtttgtggcaatgctgcatcatgcaggtctattggcattttttctaataacatttgttcatatctctgtgtcatattttggcaattcttggaataattcaagctttttctttatttgttactgtgatctgtgatcagtgatctttgatgttacaactataattgttttggtgcatcacaagctgtacccatataagatggcaaatgtaatggataagtgttgtgtgtgttctgactgttccactcgccagcctttctcccacctctttccctttccttgggcctccctattcccagagacacaacagtattgaaattaagccagttaataaccctacaatggcctcttaaatgtttaagtgaaagaaagagtcacaggtttctcactaaatcaaaagctagacatgatgacgcttagtgagggaggcatgtcgatagccgagacaggcggaaagccatgcctcttgtgccaaacagttagccaagttgtgaatgcaaaggaaaacttcttgaagaaaatcaaaagtatgactccagtgaacacacaaatgataagaagctagagagcctcaccgctgatatagagaaagttttagtggtctagatagaagatcaaaccaaccacaacattcccttaagtaaagcctaatctgcctaatccagagcaaggctcaactctcttcaattccatgaaagctgagagaagtgaggaaagggcagaagaaaagttggaagctagtagaggttggttcatgaagtttaaagaaagaagccatctccataacataaaaatgcaaggtgaagcagcaggtgctgatgaagctgcagcaacttatccagatctagctaaaatcattgatgaaggaggctacactaaataatggatatttaatgtagacaaaacagtgttaaggtggaagaagatgccatttaggacttttgtagctagagacaagtcaatgccttgcttcaaagcttctgaaggcaggctgactctcttgttagcagctaatgcagttggttacttaaatttgaagccagtcctcctttaccattgtgaaaattgtaaggcccttaagaatgatgtaagcctactctgcctgtgctctagaaatgtagcggtaaagcctgggtgacagcatctctgtttaccggatggtttactgattattttaagcccactgttgggaactactgctcagaaaaaaaaagattcctttcaaaatgttactgcttattgacaatgcaactggtcatccaagacttctgatggagatgtacaaggagatgaatgctgttttcatgccagctgaccgaacagccgttctgtagcccctgggtaaaggagtaattttgacatttaagtcttattatttcagaagtacattttataaggctatagctctatagatagtcattcctttgatggattgaggcaaagtacatagaaaaccttctggaaagcattcaccattctagatgccatgaagaacattcatgatttatgggaggaggtcaaaatatcaacagtaacaggagttaggaagacgttgattccaacccttagggatgacttagaggagtgtaagacttcagtggaggaaattacgtcagacatggtggaagtggcaaaccaaacagaattagtggagcctgaagatgtgactgaattgctgcaatctcatgagaaaacttgaacagataggacttgctccttatggcggagcaaagaaagtggtttcttgagatggaatctattcctggtgaagatgccatgaacattgatgaaatgacaaaaaaggttttaaatattacataaacttagtgagaaagcagcaggagggtttgagaggattgattccaataatgaaagaaattctactgtgggtaaaatactgtcagatagcattgcatgctatagagaaatctttcatgaaaggaagagtcagttgatgaggcacacttcattgttgtcttattttaagaatagtaaagtaaaaatgccgcagccaccccagccttcagcaactatcaccctaatcagtcaacagccatcaatatcaaggcaagaccctccatcagcaaaaagattatgactcactgaaggctcagatgatcactagcgttttttaggattgaagtattttaaaattaaagtatgtacattcctttttcagacctaatgctattgcacactcagactacagtatagtgtaaacataaattttatatatgcactggaaaaccaaacaattaatgtgatttgcattatggcaatatgcaccttatcgcaatggtctgaaatgaaacctgctatatatttgaggtatgcctgtatttaataatgtttgttcaaaagaggacagcaagcaacagccttgattttattctctgaaaaatcaatccttccttttttcctttgtttgttcattcaatggttttttccttccttttcttcctctatttctggaaaatggaagccttgataggatttgtctagcatggaatgcatgcagtggctaactggagttttctgccctggttctacccaaagttctcacagaatcttaaatctccttgcctttgcccatgccatttcctttctttggtatatgtttctgtactctctctctttctgaaaaatcctacttgaacttcaaaatacaggttaagcaactagcattgggtgaccttgtctcttttaggcacctaccttggcattctcattgccctcttaaaatatctttgtggttatgcattagtaatttttactctaccagtgtctctccctacctaatcttcttcttcttaagggtgggcaatttgtctttcatcttgttactcccagcactgagcaggatctagaacaaggtgaatctcagctagatgttgtagtcagtgtaataaattttcaaacacttctgtttttcagtgaggggaaggtgtccaaggtgggcacatcagcacatgtggggagattgggctgggcatgtttaccaacagtgcagtgctttattccattgctttggtttattttccacaatgatactttatttcttcttgaagatcaaataacattttttagggcataggatttttttttttttgtcaaagggaaaggtcccatattttaagaaaatatttggaaatattcctttaatcataataacagcagacatttgttgactacttacagcaacctagacaacctcaccagaacagactcctgctatggaataccaatagttccctatttaaatatggcctggatgattttgattggctgaagatgggtcacatgcctgcatcctagttgcaagggtaacttttgatgtgagcagctggatttttgtctccatagttataaatggccatgacctcccatcaagactcataaccaggaatttacctgagcatatgaaagaaggttcatatttagggcaggcaagaaagcatggcaatgtccattaagtcttacgagctgcagtaggtgttcccaatgtcctgcctctatcctgagccatcaccaattcattgcatgctggcccaaattcaacctccaaggtttgcattgttttgccaaatgactttctcttgcagccagagcctgctttatcacctgcaaagcaagccagaaatactgggaaattaatatccctgggattagccattaatcaatgaccaatgggagtctttggcatataaataactcttctccttgatcccttgggtgggataactctgaggcatgttttgcactgaatgccagagcttctgagaagaattgatctccaagtacccaaaatggaaacagcattaataacaaaccttatattggctgccttccatcctgggtctcacttctccattcccctggttgtatttttggggattacgtacaaaatgaactacttgctctctaatccttgtctcaaagtatacttcagggggatcccaaactaagaccaatgtaggaagatgttattaagctttattttttgcgatttgtatcaggaagcaaaaccaaaccaaatctcacctaaagaggttttcaaatataaacccataatattgaatgtgttatttcaaatcatttcctctatgatttaaacttagtatcctaagagatttgcccctctaatgagtattactgaaatggtatatcggtagccacctgacgctcaagagatacttgtttgtttacttatatgctagggtaggaagaatattacccttatccatgcatgacgtaaaactcaggaaaaaggttatgtctggagctgttgatatggtctggaaatatttatttggaagccatccatgtagaagtgagagttgaagccttgggggatgaaacgattgcctggggtaaagcaataggaaaagaagaggataggtaagaattgacaatcaactctgtagcaatgcttgggtaatgaggagaaaagagaaatcagttaggtaattagatggaaaagggatggaaaagacagacaatatgggttgcatggggtcattgaagtcagaggagggaaaggttttgaagaagtagtgaatggtagcatcgaatgttagtggctctactggtttgggcttagggaggtttagagttaaaacaaagtgaaggaattgggagtaagaaactcagtggttgtgagagagtaggtgcagtagagtgatagggatgaaagacaactggaaatggtagatgagtgggtgaagacatgatagagcaaatagagcctgaaatcccaaactcgtaaaccccccaaatctctgaactaatatgaggctatttacattttttaatccaccccctttcatgcaggtatttacatgctcttgaaagtactaatgtgatttgttttagggtggtgtcttgggcatcctggggtattacataatatgcagtagatgctcacgtatagatccggatagggtagcttatgttgcagtaacaaacaagccccaaatagcaggggcttatgcaatgttacatgcccattgtgggtcacttgggactttgcttcctgacatttttattaaggacccaggctggtggagcctccattacctgggatattgccaatattatgccagagggaagtgagaatgtgatgcaaacacatgctggctctcagagcttcttggaagtggcacatgtcactattgctaacccttcacatggcaagccaagtcacatgaccattggagctcaatagaatgaagacgtatattcctcctgcagggagggccaacctagggagggcagtgaatattttatataacagatgcagtctaccataacttcagatctttttaaaacctgaattcaaaagatacctggttcttagaatttcagataaggagctatgggcttattgtaatctgttctttcaaaaaatctggctgtgtaaagaaagagcagcttgaccagaagctgacatgaagaaaggatgttctcataaggaagatttgaatattgaataagaatcacttggttgaaaatgacataaacccaatttaaactactttaagtaaaaatcagattttaagtttttgctgattgtactgttttcctatgatgctgtaacaaaataccataaactttgtggtttaaagccatggaaatttatttgctcacagttttggaggtgggatatctgaaattagtatcactgggccaaaatcaaggtgttggctgggctgcgctccctcaggaggctctgggggaaatttaattcctcgcctcttccagcttctggtggttggcagcatttcttggcttgtggccactcactccaatctctgccttctccttttctatatgcattgctttctccttctctgtatgtgtcaaatttctctctgtctctccatctcagccaagatacttaatcatatccacaaagttcctttgtaccatataaggtaatatttacaggtttcagtgattgggatgtgcatatcttttggagggccattattcagactatcactctcagataggttcttctcatgagatggtaaagactgttaccagaaactctagacaaggaataagaaaactatgattttaaggccaaatgcaggctgcctgttcctgagaataaagttttactggagcacagccatgcccatttgctacatattgtctatggctactttcatgaatggagtagttgcaatacagagcttacaacccagaaagactcaaatattttcacttatgccatttacagaaaaagcttgcttgatgtctgctctagactgatgttttaccagcttagcaactccagtggaaaattccaaaatttacatatattggcttagcttggaccacatgctcatccttgaaccaatcacgatgtccacgggaatgcaaagctctggttggaccaaccagaatcctgtgcccacctctgtaacctggacctggggtaaacctcacttaaaacacatagatcacagaagagggaggcttttttttccaaaagagatcttgggagaaaataccaaaataagggagaagggatgctgagcgatgaatgttttgagaacaaaaaaagagtagttcactaagagtatgctcgtcagcagagtggaaggcttcactgggggaaagaagatgcaggagcaagaaggagagtgcagagaatcagggacagcattggtgtcaagttagatctccacaaattcctcaaaaccaagcctgagggacatctgagggacaggtggaagattctagaaaaaatgaggtgaaagaaatgaccagaatgttaggaggagaagttgtagaggttggagccacagaggccagagcagggaagagataagagaggaactatcgacagagttaaatgcccctgagaggaccagagacgaatgaacaggacagaaatgcgcggcggggagctgaacaggaccctggcttaacgcagtgggttgcaggtctagagcagaagcagttgtgcttcctgaatccagttcttatacttttctcacactctgaataatctggtcctaggtgtaagtttttgacagtcacggttctctaaaacaggaattgctaagtaataaaactcttacattaagagctgtgaacttacaggaaattattgaaatgtgcttaactcttgatcctcacctccaagaaattttaaaatgcttaaaccattttatcataactttgctttcttctcaacaaagtattttgagatgattttttatgggagatgccacataaaaatcaactggtttgaaatggcagaggttttaaaagattttaatagattgataaggtgggtcacctctttacatctttggcatgaagcccagagaaataaagtaaaaaagtaagaaagagacaaaagttgggatagtgcagagggcatttgagctgagaaaggagccacactaatattcaatgagaatagcgacctttcaactttccaagagtgatctttgtcctcatggccaaaatatactccagtggaaaacactgggttatgagaactaaaagtagtgtgtgtgcgcgtgtgtgcctgtgtgtgagctgatgtagaaataaaaaacacatcatgagcatatatgattgtctccaattaatattccaggaaacacaggaaaggtggtaaaaataagaaactttgccctttgggcagttagtaccagtctaggaaactgctggtgtcaatatattgatgcttccctttgcacatctggtgaaatcttaggatgccagtgagtgtgtctcttcccaggatgaactctctctctctttttttaaatattgactttaaaaatacaatattaatttgggctcagtgcagagatcaggacaatatgggagcagcacaatgcacaaaacatgcctgatctatgagaatctataccaggtttccaaagcatgccttggcatcagagccagttgtgctatttgctgaaaatacagtcttgatctcaccatagactgagtgtgtcagggtctgggaatccgtttgtatcagtccattttcatgttgctgataaagacatacttgaaactgtgcaatttacaaaagaaagaagtttaatggacttacagttccacatggctggagtggcctctcaatcatggcggaaggcaaggaggagtaagtcacgtcttacatggatggtgacaggcaaacagagagagagagcttgtgcaggggaactccttttttttaaaaccatcagatctcatgagacttattcactatcaggagaacagcatgggaaagacttgcccccatgattcaattacctcccactgggtccctcccacaacatgtgggaattcaagatgagatttgggtggggacacagccaaaccgtatcactgttcttttttttttccttcaaatttcaaagttcttttacacatttacatctaaattttatttatttttgaatagatgacatgttcataagtataaactgaaaagatttaaatgaatatatagggaaatataagacttggtctcacatctgatttttaggatacttgttctcctctccgggggaaccctgttaccagacccttctggagacatttattgcttgtgcaagcatatggtactcttttatatatgtgtgtgtgtgtgtgtgtatatatatatctaactataattcatatacatgtatacacatatatatctacatgtgtatatgtttaaaacagaaacagtagcaaaccatttatatggttttgctttttaaaaacttaatcttggaataattgcacatattcacattcagagctatattgttcttagctgttgacttgatagttcatcactgatcagactcctactgatggatatttaggttgtcttcaacatgtgcctctgacagacagtctcataatcaatatccctgttatttagatatataaggagactgtaacacattatataagttggcccttttagtttcaagccatagaaaatgaactctggcttatttaaacagagaaggaattaattagaggatctacaaaagggccagggaatcagagaaaccaggaaaagggtcaaaactgatctgtagaaggaactggtgtcatgaagacactgctgtcatcattgctgggtcctaatgctgctgcctgggccagggataccggcctcactggaaacagcaactccagctaccatcactgacaccaccatttgtacaaactggatgtagttctggccccactgccggtacctttgccacagtaggttgtgcacaagctctgcttttttgtgttgtaaactctccaagattcgcttgattgttggagcctattgaagtggctccgttgtctggggtatatactctggggttcgtggtcatgtgccaggaaaatttaggacattgacacacacaaggagttcaggagcggagttttaatatgtagaagagaagagaaagaggaacagcttcctctatagacaaagggatctcccagcagaaaggaccggctggtggcaaatgtgccgaattttatagtccagtttggggaggtggtgtctgatttacatagagctcatagattggttccatcaggtatgaggtttacatagcacgtggggaaggctggtcgttccaccctatcttattatgcaaatgggctttccagttgatccacaccatcttgtccgctccttacagtacatgtggctggcagagaagggaagatggagccaccatcttgaaaatgtctagtccttggttcctgccggcattcacccgtgcaagctcccagctttcttgtctgtgtctgcagctcaactttatgggctgctctttgttagaagtcattatttgtggggccacgtgcagcggctcatgcctgtaatcccagcactttgggaggtcaaggcgagtggatcatctgaggtcgggagtttgagaccagcctgaccgacatggtgaaaccccgtctctactaaaaatacaaaaaaattagccgggtggtggtggacgcctgtaatcccagctactcagcaggctgaggtaggagaatcgcttgaacccaggaggcagaggcttcagtgagccaagatcgtgccattgcactccagcctgggtgacgagcaaaattccatctcaaaaaaaaaaagaaaaaagaaaaaaagaaaatgatttagggctgcttttcattgaaaaaagaaaagccttatggaggactctcatacccttactaactgcttaagtaattctttcttaactcctatatcatatgttatgtgttctaaccacaagggagtccaggaaagtgagaataaaacctctacagtgacagtttttctctgaccccactgcattacttaaaggggtcaggtccttaacagggggctgtgttggttggttggttgggtttctcccaaaagcagatcatgtgtcaaggctttgggtatagggagcgtgttggaagatgatcccagaaagcactgaatggaggagtgggcaaaatgagacacaaaaggaaggaaagtcaatgaaagatgcattagtgagtggctttccgttgtgggcatccggggctccattccactgaggagcctctgaagcatcatgtaggactcacttcagaactgacccactggctttttagtgggaaagctagaatatgtatcctccaactctcattcttcattggttgaggtttgttcatagaggccttacatccccggccgagcaagctcggcaccagaggagcccctggttagagaaagagtcatgaaagctggaggtgggaagcgtcagtgtgggtggagaatgtccacgttgattcctggaaaatgtggaggtgggccacgagaatcaggggtgggcatcaccagtgtctgctacaaggggttcatatactgggtaaccgaaaatgagaagctgagaggatctcaaaagaagacagaaaataaataagtgaataaaaaatagagtaaacacaagtatggcttagtgattgattgctgaacaaatgccttctggatatatcagctctctaatgaagaatgcaaaaaagtactgatggtaggatcaatattgttagaatctcctaatttgtttactattgatagataccagctaatatgatggcactagacacaatatttgttttatatttatcagctagtgggaatatatttctatatgccaatttttttgagtactgctgatgagtacacacgacatcgtgactgcaccattaggtttgatgaatccatataattgctgcacaaatattttgaatttaattgcatgtaatatagttaacactcggttatgagtgccaataagggaagcagtgacatggataattcgaaacagtggaaaacccaaaatcgtttatgtaaaacttctttggcccatttttgactcagggctacagattcacctttctaattatattttgtttaggctagtaataagaattattttcatttggtaaaacatgggctgatggaagaagaaagttgttgaaatgtgttctgcttgttggtagaagctggcattagaagttttcaagagatagccacatttaggtaattgagagtttactggctcaaatctcattaaagtcagatgatttctcctcattgttcacgtatgttaagtaccaggcactgtattaagttctttacacagatgatctcattctttccttacagccgccataattaggggatgttttgtagtggaaaagaatgatacttctagaatcaagttgtgtttctgccaagttattagttatgtgaaattggtcaagttactaaatcagatgaggtttttcatctgccaataatagtagtggtaagccataaagttgctgacagcccacggtgactaaataagagaatctatctaaagcacagtgactggcttatgatgtccagttccattacagactgggttagtctcaaagttggtgttctgcttatcctcagcctgtgctctcagtgagccctctggaacagtgctccttaagcttttaaatgcatccagatcacctggggaccttgttgaaaagaaactctgatttagtaagtctggaacaggacctgagattctgcattcctaataagctctgggagggtgctcatggtactgacttgtggagcactcatggagtggtgaggcactggataattttggtcaaacattttaatttcactttagttttctttgtatccacagcaggttcagagaagaagcaaggctttctgtctgcttttctttgccatgcaaggtccaactcaggtgccagacttccaggaaatcttcctcatctctcagatcccttgaatgtccctttcccacatttctagtacagaagtttttctagtactagaagttttcagcaaatagccacatttgggtagctgagagtttactggctgaaatctcattaaagtctgtcaggtactttctcctcgttgttcctgtatattcagtaccaggtactatattaagttccttacaaagatgatctcattccttcctcacagccaccataattagatagctacctgctgggaagcattactgggaagtagctatgaatacagaccctggggttatgcagacttgggtttcaattgaatctctgctgcttactaattctgtgactttggacctgtggaccaataacttctctgaacttcagtttcctcatctgtcaaatgggcctgataataaaagccacacaatggggtcattgtaagactcagacgggtgcttagtgtaaaaagtcttagccctatggctggtacccagcaagtgaactgagaggttcacagggttgtaagcaaagtgaggatgggcacttacatgttttgtctgtcattttgccagttcatgtaatccaaatatggccgcttctctcttctttcccagaaactcactttcccagtctccctttcagctagggacagccatgtgaccagttctggccagtgagatgtgagtcccactgttccagggacttctgggaaaaaaatctacgacctgggaaaggaaagagccagttgaggaaaagccctttgtcccttctttgtttatatctccaacttcccgatttttcctgtggctgtgatggccaggatgtggcagccctctggttataacagtgtcacaaatccttcattgaggctgccttgcaacccaagctctgcctctctccaatcctctctttccctcccttcataggtgcagatgctgagagcactttctagtcaagtcctgcatgttcatttctgtctcaagtcagcttctctgagaatccaatttataaaaatatatttgtgaatgtataagtaaagtgacttggattttgtctacgtacaaggacttctatgcctgcataaaacaggtaatatttatctttcgttgttgctgtttctggtgtctaaatccccttctaatagttggaagaaattttcctgcctcttaatatagagtcagattctttttttttttttttttttttttttaactctgtcgcctaggctggagtgcagtggcgcgatctcggctcactgcaagctccgcctcccaggttcacgccattctcctgcctcagcctcccctagtagctgggactacaggcccccggcaccacacccggctaattttttgtatttttagtagagacagggtttctactgacctcgtgatctgcccgcctcggcctcctaaagtgctgggattacaggcgtgagccaccgcgcccacctagagtcccattctttaattcaagaccgagtagccagtgctggttaagaagtagtgggagaggttgtgttttcgcgatgctgcagctgcactgaggtctttgggggcagcagtgccaactgcagcagggatcgtttacaggagcagcctctctccagggcctgcaggctgcagggttgggggtgctggccggacaagctgcagcttccagtgctctccatgggggacacagcacatccccaccagactaggctgtaatgtgcttttcctgtggttagggatggaaagccatcttttgtgcagctctctgtccgtgccttgttctctagccttcctaaatgattccgagtgcagtcagtttttcttatttgcatcacagaaccatgtctgcggcctactatgtaatactatttaatttgtatctgtggacatttaaagtcttgatatattttctgtatcattattgataacaatggtaagtatcatttgaggatttataggtcacagaatgcctacgtatgcattacttgatttattcctcatataacactgtaggttaatatatttgttttaacccttattttgtaagttagcatctgagaggtggaataacctgcctaagctgactcagtaaatggcagaactggactggaacctacgctttctttctttcttttttttctttttttgagatggagtcttgctgtgtcacccaggcccgagtgagtggtgtgatctcagctcactgcaccctccgcctcccgggttcaagcagttctgcctcaatctcctggtagctgggactacaggcgcatgccaccacgcccggctaattttttgtatttttagtagagatggggtttcaccatattggccaggctgatctcgaactgctaacctcgtgatccgcccgccttggcctctcaaagtgctgggattccaggtgtgaacctacacgcccggccggaacctaagctttctatttaattttttaaacattgaaatcttttggaagcaaatactatgttaaccaaaaatctgaacatctcaccttattgaataatggagatgatttaagtaaaactttaagtcacaaaataaaaatatctttttcttaattcaaacaatacagaataatagaagatggaaaagtaaccagaagaaacaaatgctaacactttcttttgcatttttatagaaatttttgaaatacacatacttaagcaggttgaagtatagtgttttttaaatacaaatcaagcgatattatacataatgttctttaacttgcttttttatcttgcattcagtgaaatatctcagacatcttgtcaatattgttgtaaatagctttgcttaattctaactggcattcattattttgtgcttatattttaatctaaatggtcagtcttctattgatgtatgttgtcttaagtactggtttcctggaaccattgcctgagatgggcatttttataaacgtgatttatcaagggagtggatgaagcaggagaggacagaggaagaatcctggcaatcctcttgtcctcttgagatgatgctgtggcttgagctcttagcagccaaccctcactgctatttaaggggaggaatgccaattcattaaagagatcttggtgggacaccatcagcaccagctacatgtatttagatggtttccagttttctatattaatcattttgggatgaacattctcatactattcatgtctttgtgtgctgtgaaaaattcttagatgtgataattctaaactgaaggatgtggtagcaatgccagatactcatacaatgtccagtgttctttcctccttactgacacaacaacaatttgttggctgtgtcaacatgcctagttttaaaaattatacttcccagccttctttgatgttagagacatagttttgaccaataaaagtgaagtaattggctatagcttccaggaaggctccaggtggggtaggaggcagtggcagtcacactcatctgggacatattctttatgcacttcaccctcagctttttcttgcccagaacggggatgtgatactgaagggggcgcagccaccttgtgattgtgaggtgacaggtcctcagctgtctaagcaagagacattatggaacattctatgagctgtttagcatgctggacttcctaatgacggcttctatttatgtgagggggaagatgccttattaatttcagattctaatggatatggagtatgtgcatttaaatgttggtacacacagtggagtaggatttcatgggacattaggctccaaagcagggtctctcaacctcagcatggttgatatttggggctggagaattcttggttttggtgggctttcctgtgcattgtagggtgtttagagaactcctggtctttacccactagatgccattatcaccaccccttcccagttgtgacaagcatgtctccagacatgactgaatgtctcttggttgagagctactgctgcaaaatcagcatgcaaggcaaccattacatgtagtcaaaaatacaccagaagatctattaaaatcattgataaaatacaggattcattcattccttcagaaatatttcctgaagggcagctatgtgttatgtgctgtttttggtgctaaagttggaacagtatgcaaggcacacaggaaataagatacctgctccccctggagtttatgttcgaccaggagaaaacaaactatatatatacacacacacactataaatacacacacacacacacacacacacacacacacacacacacacacaactgatacagagtacgttttgtattcctgggcatttaagatcttcatgtatatttttatcattaccaataataacagtaagtaatgatttagagcagggatctgtatgctacatatagcccgtggcgaaatctggcccaccacttgataaagttttattggcacacagccatgtccgttcatgaagtattgtctatggcttcttccatgctgcagtggtgacagtggctgaatttagttgtaaaagagaccctacgactcataagacctaaaatatttactatctggccctttgcagaagacatttgctgacccctggcttagagatttatagttcatagaataagtatacttgcattatcttgtttgttcctcgaagtaatcctctgatatagttgttttccctcttgtattatgggtcagagtctgagtgaggggatgacttgctccagttcacttagttagcagttccaggtggtcgctgtgctgctggggagactgcaattataaatagcgttgtcatggaagaactcatcaggaaggtgacagagatgtgaaggcagaatgaagagacccatgtggatagctgagggaccagaattcttggtagaaggaaggtgccttgtgtgtttgaggaacagttagaggtcagctgatggagcatgagggagattagctggagatgcagtcagggaggagtggatggggcaggtggtgtaggactttactttttactgagtgtgctgtggggcccatgggaggctttgagaagaggagtggcatgatctgacttatggctgaacagaaaacaccagttccctgtaaagaatggaccaaaagggtcaagagtagcatcagggagctctgttggggatggaatgggaggtagcagcagctgtgtgagaagaggttaaattacaaatctactttggagggagatttgattgcagatggattggaggggtgagggtaggttgagagagaacatggggtcaaggaagacaccagggatttttgcttgagagctggaaagatgaagtaactggctgagacgggatggtgggcttgggaaccagaagttcaatgttccattcaagatccctgttatgctcaccatattttttggaactgccatggactaaagaaaaaagtaaaaggaaaatgagtagttatatatttaggcattttcaaatcaaaccaccctatgttaagagatctataggtttcccaatggtgagtagagagtgagtggagaattctcaagggcttctggcttgcttgaaaagcttccaaggctctgcaaatttgttcagtaaaggactcaatggtaaatattgtaggttttgtgggctatattaatcagctagggctgccataatagaataccatagactgggtggcttaagcaacagagattccttttctcacagttttggagtctggaagtctgagatcaggggaccattatggtggagttttggtgagggctctcttctgggcttgcagacagcagccttcttgctatgtattctcctggcaggggtgatgttgagggggtgggcgggtggagagagaaagagagagagagatcgatcattttcttttttaaaaatataaggccatggtcctattggattaaggcctcacccttatgacctcattaaatcttaattcgcctaaagaccctgtctgcagatatggtcatatttggggtgggggttagggcttcaacataagaatttttggtgaacaaaatttagttcatagcatgggccatactgtctctgttgcaaactcaactctgctgttgtagtgcaaatgcatccatagacaatgtgtaacatgtggatgtggctgcattacaatataacttatttaaaacacaggaagcaggctagatttggttcctgggcgaaagggttttccaacccttagtttatgctgttctgcataagtataacgcgtgccaatagatttgtttgctctgaggattgcaaggataataatgtatgcaaatgcaactgagcacagagcctggcatacagtaggtgctcaacatgtatttgctttaagtttgacacactgtcctttaaaatagaatatggcgacctgtttttctaagttggcacttattgctcagccccatcatttttgtgtccctggtattgctctcatgatccctgatgctacagtgggattgcatctgacaaatgcttgagttcaaagtcagtgtgaaatgagtggttaatacaatatcattatgtcactaaatcatctctaagatggttgtatccagctacattcccatcaatagcgtagactgcagagagagtatctaggagagagtatctagaagttctatcatttactcgtatatgtttccccaatttaagacagggtaggagagaagtagatccacttatcactagaacctggggaaaaagctaaggacttctctgcagttccaaaacttttcctggaacagtagatgacgcgttttgtacagggcaacagaaactggggtgtttggatgggttgatgagatagtgatttattttgatgtgactgctaacactgctactactgtgagtcttgttaatacaaaactattaatcctgttcttgttccctctgtgcccgttgctgcgtgctgccaatggggaagatacaacatataggaaaaaccagattcttcactgcaaatactgctttgcatgcttttctttcattgctttgggcttctgggagaaatcagaagaaaagaaacaaggcagtgaatggtggaaatcatgggggaaagatggcatatttgggatctgcagatggatattgaaaatgcaaactagtttgctgatttgtagttgtattagggtgggtgtccaaactggtggtgttagtaatggaatttggaacttctcaatggatatgatcctgtgtgcaggcatgtggtcacctgaatagtaccactcaaaacccccaaacctaaaaaaaaaaaaaaaaaaaaaatcccattatttgcatctcctactctgttctagaaagcttaaagtttattgtaaaggtctttgctttgtggaaagatgctttttggtaaagaacatgctgtttgttggagcactgcattagttgtctgttgttgcgtaacaaatcatttcaaaccttcatggcttaaaacaacagtaaacatttattacctcacagtttatgtgagtctaggattcagaagtggcttagctggtagttcaggtttgaggtctctcatgagattgctgtgcaagtgtcaactggggtcactgtcatctgaagggtcgattatggtggattgggggatccagttccaagaaggctcactcttccaagaagggggccagcatgctggtgctggctcttggcaggaggcctcagttcttctccacatgggccttttcagaagtctgcctgagtatcttcatggcatgatggatggcttcctccagagtgagctaagagaccatggcataagctaaaaagtgttttatgaactggtctcagaaatcacaccactgtcacctccacagttttctacacagttcagtcctatttagtgggagaggggtgtatacaagaatatgattactgggaggctagaatcacctgggccatcttggaggctgactaccataagaaccagccatgcaccagaccctgcctctatgtgctttacctcatttaatctttagaggaatggtgccaatacaaggtaggatctactgctataagaaatcaaaggtgaatttcactaatttgtctaaggtcacacagctagtgagtggtggagctgggattgtaatgtatacacctgagttccagcctatggattaatgctggcttccatatcttcctcagagagacctgggtccaagtttgagcactgcccattgcttgcgtttggtcttagtaatacaacttaataattccatttgtgtagctcaaatgcaattaaccgtttggaatgcacacatgcaggagtgggcacatcaaggcattcagtagatcaaaaaaatcttttcccttaaaattttcaaaatctgaggtacatatacaacaagtagtaagagataagtttcacacagtacatggatgaagtgcttttttattttcagagttatatatttattttaatgtatatttaaaaaaatggatgaattccacttgaaaagttacttaactgaaactcaattttggtgtttgtaagataagcataaaatgctaaccgcttagagttgtatggattaaaaaaggtaatgtatatcaagggcctagcaattgaaagttcatagcaagcactcaataatatttactactattaactcgtgataaatgtaaagtgttccagaaaatatggaagtggtgttcagggttaagaacatagagccataatcagaagcacttttttctgtgcttctatattttaagagagaaactcttagtgatttggattccatttaaagttatgacacagtggtagaggaagtaagtaggaagtgagattttcttcttagttatgagaatggcatcagtgagaattaacttttacagccacagtcttgataaggtaagatggttaaaaacagatgcttttatatttagaaaactgattggctacactgggtatataaatgtgctttggaaaaattttcacttcctactccgaggtcgcctaattgccacagatacagatgttctgcttcttgttcctttgggtatgaactcacaccactctggtttaccttaactagagggacttactctcccacaatttaatttccaagctctaatgcaaaacaggcttatttgctttgacaggcaactacaggataaacagaaaggggcaaatttatatagtcagctagcactctgccattatgagtaatatggcttaacaagaaaggaaatgaagaaataaaaaaagatcccagacaccatgagatttcccctaaagaacttatttccaatgaaccctagaaaatagaaccaggacaggctctcagaagaacaggagaaacaaatattgattgatttattcataatttgtgtcccatcttctgcaaaaatctgatgtggtttagaaaaaagaaatgtcatagaatctttttttttgcaagatattattgccagaggcattcaaataactttggaatagatggtcaaattccaggatgtcaagccagtggtatcatttcctctgaacttgaaaatttttgcttagaatacaatcttactgatgaaaacaatcagtgctgaaagaggataatgttatctaaaatgtactatgtttttccttttatataatattggaatgaatgcatgtttttgaaaaattaaaaaaaattaaaagtaaaatgtagaaataagaagtcatcctttattactattaacactgttaatagttttttgtttgttcattttttaatttttttgagacaaggtcttgctctgtcacccaggctggagtgcagtagtgcgatgatggctcactgcagacttgaccttctgggctcaaacaatcctcctgcctcagcctctcaagtagctgagactacaggcgtgcaacaccatacctggctaatttttatattttttgtagagatgagtttcaccatgttacccaggctggtcttgaactccggggctctagtgatccatctgccttggcctcccaaagtgctgggattacaggcgtgagccaccacgttattaatagctttgaatatagagtaagattcattatttctggacaactctgtgcccatatcccctttctaaaaatgccacagtttccttttggggaagtgttctccccctaatttaacctttatattagtagctgaggtcatcccgaaactcctcagactgtgcatcacaggtgaagttggaatggacattggagatgcctccatgttgtgcaagacaccctgggatgagtttacatattactattaacatcatagagcaaatgcttttacctgatgtatttccttgatatgaggctgtaggccagagtcagcatgagagaccctgaacgcatggtgtgaagttgtgcagagaaacaaaggaaaggagagttgagaggctgtggagggcagactgccagccattgttagcctgacgaccagtcctgtgtgggggaatgagcttgaactcctgttgggttaaactggctcttactccagagaggaaatctgttgttgctgcctggccagcatctgttttcccttcttctgatatcagcagctcggctttcctctgggaacccctttttccccactttctgtctgtgtctaaatgatggggctgacctcctgtgcctgactccagggatgggtgcataatccaggtctagccaattagtcagttctaccctcttggccacaggggttacttcagaaacagacacatgacgtccctcaacccagtaacactcaattctattacggattttggaattacccagccaagagtgctctttttaattgtgctgggttcgtttgatagctttgaaaatataaatgctcacgttcagtgctaacttagagaatgcagccaagaccagggatcaccagcagagctgcttgacggtgttgtttgagcaccagcagcgcctgaaagttgtaacccttaaacttgatgacatgagtcaggacatttccttttttgttgtttttattttctgctaagacattttgagttgtgtttctattatattcaaccagaagagcgtggctaatagactgcattccctgtaattgcagaacccagctccctcccacagtcaaccggtgcatagccctccatgttccctggttgggtgtttttcatctgctcatgaacagatgtggttgtcagtctcttggccattttgtcctccttcccctgccctggtttcatcactgcttttcttggggaccaccacctctcactgggccctgttttgcatgcacttccatcctgaaatgctggtgatttgttaatactcaactacaaattgggagagtaagccactccatacccctctttcctgtatgtctctgttggtaccagtctattttgcttgtgatcaaatctaaatgagttcttagccaaacagctctttttttttttccttatagctttctcttgactccagacatgagcgtgtaggggtttgactttggagcaactgggaatgtcagtatcattatgtatttggaatttcccctgccctcactaaccaagctacgcttagaatggcaagcttttctccttaagatcttgacttctgtccaaggatattccttacttcaccaggcctctgctggccatacccacatagtggacatcttgcaaagctggcagtgaacagaggggaagctcagtctggatcctatttctgagagaccggaattcaggatttgactttttctcttgtcgttagaccatgtatatccacttttgcttttataagttttccagaggcaaacaaatataacaatccaaaatgcctcttatgaggaaattagttacttttagtaaaacagtttttgttaaagcagagctaaaggagcatctattgcccagtgtttaagtagcagacactgttggctactgattgaaaatccattttcccggtttattcctttctcccttgatgccagagcccactttctacaataagggtgagctccctggacatttacttttcagcctcccttgtaaatagggcaaagccatgtgacttatttctgctaagggaacctgaggggatgtttgtttgggggcagctgctgttgcttctgctgttgcattagctgctgcttctcctcccttggccctttcccttcactctctcctcttcctcttgctttttaagcagctttattgagatataattaacacagtataaaccacacatatttaaggtgtacaatttgacaaattttgacatatgtacacacctgggaaacaatcgctaccgttgaagtaatgaacaaatccatcaaccccaaaagtttcctctctgcccctttgtaacccactccttctttctctccctgcccttctcaagaccaggcaaatactgatctgcttgatgttaggatacattcatttatttttttccagcagtttttttttttttttttgagacagggtctcactctgccacccaggctggagtgcagtggcaatctcggctcactgcaagctctgcctcccgggttcaagcaattctccttcctcagcctcccaagtagctgggattacaggcatgcacccccacaactggctaatatctgtatttttagtagagacaggttttcaccatgttggccaggctggtctcgaacttctgacctcaagtaatctgcctgtctcagcctcctagtgtagtagttttaacaaatgaattcatatagtatgtactatgtactggttttttttgctctgacttttttctctagtcataattattttgaggtttatccacattgttacatctcagtagttcattcctttttcttgtttagtggcactccatggtatgaatatattacaatttgttcatccattctcctgttgatggacatgtgggttgttttgagttttgggcgatcacaaatgaagccattatgagcattcatgtacaagtcgttgcatgaacatgtgctttcatttcttttgggtgaatgctgaggagtagaatagctggatcacatagtagatttatgtctaatttttaaagaaactgctgttttccaaagtggttgtgcaagtttacattttcaacagcattgtatgagattaccagttgctccacatcctcaccaacacttggtatgtcagtctttttacttctagtgattctgtcagaacgtgtgtattggtatctcactgtgattttcatttgaattttcttgatgactaatgacactgaacatcttttcatgtgcttacttgctatccatatattttttcgtgaagtgtttgttcaaatctttttgggttaatttgcttttttattattgagttttgagagttctctacatcttctgaatacaagacctttagcagatccatgatttgccaatactttctcccagtctgtggcatatctttccatgcttttaacatcatctttctaagagcagacattctacattttggtgaatatagccactccaggtttcttttgattagcattagcactgtatatgtttacttatcttttttttttaacctatttgtgtctttgtatttacagtgggtgtcttgtaggcagaattaagatggtcttttttaaatgaaatctttcaatctttgtcttaaaccatttacatttaatgtgaatattgacatgatcatgtttaaatttattattttgtgacttgatttctatttgctccatttattctttgttgcatttattgtcttttttagattagttaaaattttttatggttctattttatctccttcattagcttattagctataactcttttgctattttactgattactttgggtacatagtatagatctttaacttatcacagtcttccttcaagttatattacactacttcatatacagtataagaacctgataattgtaaacttccatttctccccttttgagagaaataatttttgtcatacatttgacttttacgcatattataaaccccacactacattgttattgtttttgtcattcagtaatttatcttttgaagaaattaaataataagaaaaatttattatatgttttccaatagttaccatttctagcgctttgcattcttctgtgtagattccagttttcatctggtatcattttccctggcctgaaaaaatcctttaacatttttcttagtgtggttctgctgattataaaatcttaagtgttaattttgccttcatttttgaaatgtattttcactgggtataaaattctaggttgacaaacctttttttctcatttctttaaaggtgctgttttactgtcttcttacttgcactgtttttgataagaaattacgactattcttatttttatatacacacattgtgtatttttatatttacatacatacatatataaaatatacatacacaatttatatacattgtgtatattttatatatacacacattgtgtaattttatattatcttatttttatatacacacattgtgtgtatatacactgtgtaaacatatcttttttctattctacatttaagatattatctttacattggttttaagtaatttgattatgatatgctttggtctcattttcttcatgtttctgatgcttggggttcattgagcttcttggatgtgtgtgtttataattttcataaaatttggaaaattatctgccattctttttttaaatattataatttttttttacctttactgcctttgcttttagggactccaattgcatatctatttaggactcttgaagtttcccacagcttactgatgttctgtttatttttaaaggaatatttagcatagttaatattcctgttactttatattcactaatgttttcttatgcaatgtctaatctgccaataatcctattcagtgtatttttcatgtcaggtattgtgtttatcttttatattaaattttctctgcttttaaaaaatatctttcacatttctattaaactttttggatatatggaatacagttatgaaatctgtgtttcagtgcttttgtcagcaaattccaacatctatgtcagttctggatcatttcaattgattgactttccttccaattttgaatcttacattcttgctattgtattgtattgtattgtattgtactgtactgtactgtattgtattgtattgtatgttatgttatgttatgttatgttatttgttttgagacggagtctcatgtcccccaggctggagtgcagtggcacagtctcagctcactataacctctgcctcccaggtttaagcaattctcctgcctcagccttctgaatagctgggactacaggcatgcaccaccatgcctgggtaatttttgtatttttagtaaagatggagttttgccatgttggccaggctggtcttgaactcctgacctcaggtgatccacccacctcagcctcccaaagtgttgagattacaggcatgagccaccgtgcccagcccattcttgcttctttatacatctggcaatttttgcttggatgccagacgttatgaattttacctttttgtggtctgaatgtttttgtatttctacaaaacgtctttgagctttattctgggactcagtttctttacatgaaaactacttgattcttctaactcttgcttttaaggtttgttaagcaacaccagagcagaatttagtctagggctaattatttcccacgattgaggccaggcgcatcttagtctcgtgaattatgagttgttgttgtttttttttttttccagtctgactggttggaagaggcccttttcccagcctttgtgtgagtactagatactgtttcgtctactccttttgggtgggaatttcttcaggctgtcctgcaaaattaagcttctttgctgtcctcaaaacttgcagctctatcttttcatctgagagtctgtcagccttgatttcaattgccttttcctataccaaagcctggaacttctctcaaggtagtaagctgggaaatcatagagcttacctcacttttcttctggtttttaggaattaccttcctaaaatgtaagaaatatctatgatttcttatttttttaactttcattttaagttcaggggtacacgtgtaggtttgttactagataaacgtgtgtcatgggggtttgttgtgcaaattattttatcacctaggtattaagcctagtacccattagttgtttttcctgatcctcttcctcttcccacactccaccctccgacaggccccagtgtgtgttgttcctctcatgtatccatgtgttctcattatttagctcccacttataagtgagaacatgtggtatttggttttctgttcctgcattagttttctaaggataatggcttccagctccatccatgcccctgcaaaggacatgatctcattcctttttatggctgcatagtattccatggtgtatatgtaccacattttctttatccagtctatcattgatggtcatttgggttgattctgtgtttttgctattgtgaatagggctgcagtgaacatacacatgcaagtgtctttataataaaatggaaatatctatgatttctgttggtgacagtcggaggtactgtggtttatgatctacattcataattgaagaaagtgttagatttctattacggttttctgaaaataaagctgtaaactttttccttccatgtttatgaaccctatggattctatcctcagaccccttagtgatttgtgtactccaggttaagaacagcattttacatggaagatgaacattttaaaaaagtttcacaactatgtgtttattttaatgtgtgttgaaaaataatatagctagtgctgcccatccagaacttcatgtgtattgttgctcaggacaaggctaaatttttaaaaaggaataattcatagttgatttaaacaaaaatattaagtaagtgacagaacagatagtacgtaaatatgacaaaaattgtgaagatgaactacaaatgatgggttttggaaactgtcagtgtcccaccttactgtacattcttctagccattgcctgcacatcattcattgtttaacattatatcaccagaattcagacaacaaataaatccacagactgatgctttcataattcacaggaccatacattcatacaaacatgtgaatgagtagtgtgaatgtatagcctttgacatttgaagttccaaacgatgtatttgggtgagttctatagttcctctagaattgaaaggcagaaactcaaaactatctattattaattaggcagtcaaatcagatgattcaattgctgttccatttgttagcaggttggggttgtgcagtcccctactggctgggctttaggcagcaatggaagtctgtgattgacgtctgccatttgcaatgtcaattggctacacaagcaagaatggagagattcttttgaaggaataatgcatttctattctttatcttttgctgagacatggccacaaacagctccttcattttttcaacctttcctagggtgctgaataagtagccctttgaattgagatctagagccatttccctgattgccaaattaggatggctgagccatcccagcattgagaatagctgatgtgaagccattttcatgtgtttgtgtgctcagcaattggaaaaggttttgtgaactgttacaggctccctctagaaatgcataacccttgtgcttgtccccatcactctgtaatcagtatcttctacagaacagttgtattgatcatgaatgtatttaaaaggatctctccacaaccagaatatctgaaaaaagtctttcatttccttttaccttcctggaagagtgttttgctgctacatgaaggtgcacatgtctgggaaggctcaggaatggatgttgacatcatgtcataaacccctattgtggtttcagtcatttgtggaatggttgcagatggcgatcaactgaagaacggatttgtggcgttgttggtaaggatatttgacctcacccatctccatttctgatgcatgcaggtgtttggaggaaatccattacagacaatctcaaattagtttaattcattttggcaaatacttgttaatggctaactaggtgccagaccctcaaatagatgcaagggcaaagcaaatcttagtcattgcctttagggacctcactgtgtgatggaaagacacaggtgagccccctaagtcctccataaaaggtcacagctgcgtgagtgtgacagtgacaatatgtaaatatcagacagattgaagaaagaagcagggaatgaactctatccatgaggatgaaagtagggatgagatgtgaaaagaacaaatattgccaaggtcacctctggtacattattttacttagattgtctattgaatcctcacagcttgtctgtaaattgtgtataaaaattttcatgctacagataaagaaactgagtttcagaatgattgagaaacttgccctatccttgggtcatgtggctactaagtcagtaaggttggagtagatactaaatctcctaaatatttcttgattccatcaacttctttctatttccaagccactaccatcttgtcccgtctgccatggattctagctgggctctaggaagccttctcaaattcattctccatcctgcaggcagagggatgttttaaaactgcaagtctaaatattgccataccttcctttaaaacctgccgacgccttctcatttttctttagtttgctttggtgctgcttaaagtctcctttttgaatgtcacaaaatttctttttctcattttctcaaacatcgcatgctacctcttgcctaagagtctttgcacagcccagtttctagacttgtgtcctcagatcaaaagtcagtattctacctcctagattatatcaggttcatttactctcatggctccacaataataataatagctaatatttattgagcacttaatatgtgcagccagctttacaaacactctaaatgtatcagttcagttacattttacaacagtctcaggaggtgtgcactattagctcaacttcacagatgttacttgctcaagaagacctcacttttcggtgaggaatctgcttgattctgaagtccatactcccactactccattacactgcctttatagtcatggtaatggtcatggagatgtgcccttagatctcccttaaagaaaactgctgtgaagagtgtagctaactgaaccttcagattcgttgctgcattcacacaacagtgaacctatgcttttcccaggctgcccttggcaatgaccaaacatggtgaggacactagagcagggttatttttgcccagtgcaggatggctttatgggcaatctttgctcaaggaattcctgtcaaccttgccaagactttgtcagagtgacaatgttgtttgcggttcttcctaccaaatcctctttctgtcctcctttgtcattgttagacctgcattgcattctgaagtctctccatgcctgttcttgcctcctctcccttagtctttcccaggaatttccgtcaataaatctcttgcatgtctaatttcattcgtggcatctgcttctcataggagaactgatatagcatcctatatgtttcttcgcagtgcatgttaatggattgtaattataaatgtatttgtttgctcatttgattaaagtctgtctctctctcccacaagactatgaattctgtagcagtaagatctttttatcttttgctcctcagtgtattcttgacacttttagcacaatgcttggcacaatacatattgctccaaaattgattgatgattgaataaggccagggctagctggctccgaagcttcctctgtttaactaggagttcgttttgtgcttcacttgggctgatggactcctgaaggtagtgtcctgagcaaaattcagtatgttgcaaggctatattcaagtccaatcatagtagagatgaaaattaaacttacatgaccacattagttctagaatcactttttaaattattttttttttaaaatctcaacatttaaaaaatattttcaaacacaaagcaaagttaaaacaattttccatgaaaacctgtatactcacccttagattccaccattaatacactataattgtttatatcatatatctatccagccatccatttatccatcttatgtttttgactcacattaaattgtagccagtatactgctgcctaaatacttcaatcttcatattattaaagtttacaatttctttacgattttacttttgctgtaaaattcagcaaatgagatgcacacattttaaatgtatatttgataagttttgacaaatgagtacatctgggtaacccaagcctctatcaagttacagaacactgccatcatcccagaaaatttttctgcaggtctttcctagtcaatgccacccccacttttccagaggcaaagatgtttctgacttttttttccatcatagatgagttttgtctgctcaagaacttcccataaatgaaataataatgtactcttttacgtaaggcttcatgtcactcttctgcttaaaattcctgcgtggatccatgatcatagatcatgaatctacaaatcccatggtacataaagcaaataccttaactcttcatgatctccaggtttgcctcttctacattgtcattctatggtaccgttcctcaaatgcaccattctaagttgcttttgaactttcaggcatagtttcctccacctggagcactttattgactccatcccatgccttcacctgatatagaggttgaccgttgcttttgtgggcccagcgtctcttctctttttcctctggtaacatcaatccgtcctccacgtgtgcactacctctccattccccacatgattctgtcgggctttcagtggcagttctctgccttcctgccctcagttcctgtcaattcatagtcactcatcccattaaccctggtaattcgttaaggggttgggacatgtgacctaagctggacaaatcatagcctttacaaagattttatgatgaaaaaaagtcaactttacagagaaattagaaaacgttaatttccattatctagattctaccattaacttttgttatacttgcgttatcacataccttttccactacctgtccattcactcctctgttatccatcaatcaatccatcctattttttggtatgcatttccaaggaagctgcagtcattggtaatcttcactcctaagcagttcagcatagatcttatgaactataattcgatatttgtttatggttttgaggagcaaactttacatacagtaaaatgcacaaatcttaagtgtaccactggctgaacttttgacaagttttcaacacaaaccactatggagacatggaggacattgccatcagctccaaatgtctcctcttgcccctccccaatcaattcttgccctcatttctacctagagacaccactcactattctgtttttttttttttttttgagatagtgtctttctctgttgctgagggtggagtgtagtggcatgatcatggctcactgcaaccttgaactcctgggctcaaggaatcctcccatctcagcttcctgggtagctgggactacaggcacatgccaccatgcctggctagtttttgtattttttaaaaatagatacggggttttaccatgttgcccaggctggtctcgaactcctgggctcaagtgatccacctgccttggcctcctaaagtgctgggattacaggcatgagacaccatgcccagccctgaattttttttcaaccatagattagtttagtttcttctagaacgtcacataaatggaatcaatcagcatgcactcatttgtgtaagtccatcataatgttttggacttcgtaatgttttggacatctaaatgttttactttttttttttcaagtcttcccagttttgagccaatacattcccttttaatgcttagacaatttcaagttggcttcttataacttacaatctgaagaaacctggctgatccacatagaacactatcactcatccatcaggcctcgggttaaaggctattacttatgcctattaattcaggttctcctttctatgtactttcataggacaaatcatttctgtaatctatttgtgttttggtttgcctgataaactgtaatctcactgaatacagagactttgtctgcctgatttgccaaatattggcgaactgccatgccaccaacctcccgaacagtttgcttctctcagtggttgtttaataaatatttgtccaaggaataaatgaatgattgactgctcttagctcttctagtgggcatattgtaactctaagtctgcattcaccacaaaaaaatctaaaaaaattactggtcaaacaactcaaaaattaggtttataaaatgatgatttccttcaccttgcatttgccattcctactcatttttcttttgatggcttattgctttcttagaaatatgttttcttgacttctgaactgaaagacaatatactttcttttgccctttatatcttaggacacttactctttttatacaagatttactaatacgttctgacattctgatgtattaatgactgctcatcaataagtgtatttatctttgtattttactacagtaggattcttttgtggcaatgcattagcttaaagatgtgacacccaggttacatcttttttttttttttttttttttttgagatggagtcttgctctgttgcccaggctagagtgtagtggcgcaatctccgcttactgcaacctccacctcctgggttcaagtgattctcctgcctcagcctcctgagtagctgggatgggattacaggcacccactaccacccctggctagcttttttgtatttttagtagagatggggtctcgccatgttggccaggctggttttgaactcctgacctcaagttatccacctgccttggcctcccaaagtgctgggattacaggtgtgagctgccgcgtccggccccaggttacatctttaagatgtaatgatttctcattgataggattgctttttgggatcaggggctctactctgcttcagttttacatatttcattccttaatttcctcatccacaggaaatctcccaaaaataaagctaaaaaaggtagatgaatcagacacatgagttttctttatgttgtggtaaaaaaatagccctaagatctcattggcctaaaacaacatttagttcttgctcatataaagtctgccatggtttgcatgactttcttttttttttttgaaattccaacttttattttagagttgggggtacatgtgcaggtttgttacatgggtgtattcaaggcagcatttcgtgactctgcattacgcctcccaatcagtgggtgcttcctcactcgtacaggctggagaagaggaagctgtaccttgtgtgctgccttttaaatgcatttgctcagatttcattggtcaaagcagtcacatgggcacacttagtttccaggtggcagggaagtattaatcctatcagatgtttggaaggacgcgaaattgaaatattggggaacagaaccaatggctatggttctgaatctcttgcattatggttggttgaaatgggatatgagtattgtgttttaggtactttggactctcaatagttgaactctacatgggacttgaagtgggattcattcagaggaggatttttgaaggcctgctttccttttctttttaagcacttacctacaaagcaactgtgttaaatagaacatcaacttcagttctcagcagaaaaaaattattctctcccccaggtaatttcagttttagtcaagcatttcaatgccagcctgatattgtagaaatttagggattttttttagattttttgagagaatgaatcatggagggaaagcccttgggtaagcccaggttttagctgtttatcttttgagaaatgttgattgctgtgcagtaaaaagttggactcttgtgttcacaaaaaaagaaagaacaagttaaaaggagctgcttttgcttttggtttaagagtctttcttaataaggaacaatgaacatcaacacccagttattcagtaaaccaattaaattaaattagcacagccaggaaacaaaggaacaatccttcaactcttccatttataccatagactcagcagtcacaatacaagaaagaggagtaacaatacagtctgtaaaggcaattaatattaatttttcatttttttctccagctaacatacttaaaatgcttccctgcccccccccaaaagacagctctagtatattatttctcttttcttttcattcacaatacaattgagataaaattagcttttttgcgtctttcccattactggtttacattcaatgttgtgtctttgaaacagttttaagcaatctccttcggggactttcccattgcttaccctggttagtctgtaacaaggatgggctatcccagtacagtaaagaatgctggctttagagaatggtcttaggtcaagaattattattgctcaaggccttcgagatctagttatgggtttctgcaaaccctgtgggctcttatgataatgcttttctccactattattgttataaggcattaaatcagtcagattcatgagcaacaagaggtcaacgtctgattgaaattcataaggtcaaaaaggaaactaaaaattaatttataagatatgaagatttaggttcaaactatatccatgagcaataaaatttcacatccataaatgtaagaaaatcagttattaaacttgaggggggaaagaagacttattaagttttacacacacataaggcagctaacacataattttatcagacattactgaaatcctgtgtgtaatataagggatgatgggataaaatgctaaatggtttagcactaaattattaagtgatgtatccctaaggtattaaacagatagaaaatgcagagcaggtgtctctcctagcaagacttgatcaccagtttaagtgcatattgataacaaatgcacttcagagagaaaatagtattagtaatatttttgctgcgtgaaagcctggtgtcaggatgactaaaagcttctccctgacaaagaaatgttcatttcttcttcttcttctttaaaaaaaaaaaaaattaatcatgttaaatgttaggtccctatggagcaaaaggggaactctagagggatttgagtgtttccttatctctttccttccatcatttctgcatgcaaaaaatagaatgagtggaagagaagatctatctacataatatagtaaaaatggaaaacatgaacacagttagtgtggcaaaataaaaagatagttttgccaggatgagagtaaagaaaagtttatgaaagcaaatattggcattaaaaaaacccaacttagagccacagtgcagttaatagcttaactctgttcttggcttgatgtccattttattccactgataaaaggaaaatagaatctttctggtctacttggtaatcagaggctctggctgaaaattaaatagtgaaaacatgtgtttgtaagtgagttggaaggcatctctcttttttctccgtagatgccatataaatctaagcatagttcctgataggtttatggaaacacgatgttagctagttttctgtggcccttgggagctccgtaagattggctcaaacctcactccacacactgtggaagccctgaatgctctccttaaattgcgaaaattctcatgaggctaaaatgcttttgttacctatcatccttggatctgagtgctatgtttgctgcattagtttcgtttatgaatcttttcactattccactttgttttgacctatgatggcccatgtgttgaattgaaccctttcttgaattatacatattctctctctctctcttacacacacactcacacccttcactcagagaagtcatgtagacatgtaagttcagttggtgtaaaattgtacatgcaatcctcatttcacagctatgggacggaggctttgagaattttagtaacttgcttgaggctctggagccttgcgcatggagttgggcctccaacatagacgactgactctaagtcccttgtcttctctactcttctgtcctaggcttgaaatcccctgttggtatagacagaggccagcaaactatgccacaaggccaaatctagtcctccatctgttcttatcaataaagttttattggaacacagccatgctcatttgtttacatgcactctacagccgccttctcactacaatggcgaagttgattagttgtgacaaagactgcacagcccacaaagcctaaaccttattctctggccctttaccagagaacagtttgcagacccctattgtagacgatagattcgtatgtacttcatgaacaacagggttcataaatattaacaggcgtgacatgattttttaaaagggtgttctgtgatctaataagttaaggaaatgctggttcaaatgaagttaaagagacccctcctcagagcctttactgtactgatgggtgcagtttctcttcgagaagatgaagagattttgcataacttgaacccagaactctgtgtgtgtgtgtgtgtgtgtgtgtgtgtgtgtgtgtgtgtaagtaataatttataagacacatttgggaaagcctggattgggtgataatttggggaatatacttcctaaagggtggcatttgaattcctaggtcttccttgggaaggtagctagagaagagtagaattttccatttgtaatatcagattgattaatttaatgtaatctctaatgttaccttagaaaaaggttctcagtctgtggtccaaaggatcactgggattttctatgacctgggcagaagctaatctcttttgactttataggaaaaaataacccaccagatagaattttgttcattttattttcctccccatacatttttcttgagcctgtctgtgagtaccagctataggtgaccggtggataaacaagaatcaaatgattattaataaaaaattggaaatgacagaccttatttagtttgataatttttttaaaaaggtgcatttatggttgctacatggtacatgtgtcatgtagttattttctgccgaatgggttgctctttgtatgtatggtaaaattatgtatcatgtatttcgtgatattctgcatatagcacacagggtttccaggggctctcgctggctttaggaggttggaacagcagtgttcagtgctggaagattatattactcacaacttatttggttgtggatgacaaaaatccaattcaaattcgataagtaattgacttgtataacaagagcaacagtggatgtagctccagacatggccgttcccaggagttcaaatgacatcaccaaaacttttgtttctctttattgttttattctcacttcctccagttgatttattttcttggagtgtctaaggttattggcattgctagcttacattgtttctgtaggtagagatcccaaattttcttaaacagccttgtattagttcccaagaatgtctttgcttggtcctgcctggctcatttgtccaacactggagcattccctatgtccagggtgaggtattctgattggccagattggatgtcatgatcagatgtgtgaccagcaagggacatttcatgtttgacagtcccccaggagctagaaggggaggttcctaaaagagaaaagaagaatgtattgtctgaagaaaaaggaagggatatcagaggtctgtccacagatttaggaggcagagacattggcttggggcagaaagaatatcaatttgggaaataggggaccacactagaatgcaagcttcatgaggccagagttttcatttattcactacttctaaaatagggcttggcacaaaataaacactcatgaattgagtgaatgaaatattcagatggaccatgggaattcaggatttaatagaaaatatcatgaatatcctgggggtgatatggtagattataaaatgcccacaatcgttcactctttctttaaagaagtggagtctatttccccatccttgcatctgagttgggaacaaccaactttggacaatgagacattagcaaacatcactggagcagaagcttgagacacactcatgcatgtaggacatgccaggcttgtcctcgtgcagctgttggatctctgccaccatttgaatgagccagaactagcctgctggaggatgagggaccgtgtagaagagagctgaggcacccaagccaacagccacccagcttcccagctaatccagaaaccaatcacaaactcactagtgagtctcagccaagatcagacaaccctggccatgatcagcagcatctcccaaccccaattgccagttttcagacacatgaactaaatagaagttaatgttttaaaccactgagttttgagggaggtttgttatgcaacacatgctaactgatataggtacttaggttcttgcctgaagagaaatactgtcagagtccaattctctgatgaccagttttttccttgttatcattcttactttcaagcccagaggttttaaagtcctcaagttcatgcctcggtttttccttcccttggtgtgcaaatatatgcctaacatttgcatttttatcagtctttctatatttccttgccagattttcatgagagtgttttataattattagtattattttattgtcacatatatatctcagttaatgccgacatgattgttcttgctgttgtaacctgaattaggaattttcacagttgggtattgatcattcatgtaattgtatgatgaaggaaatacaattccctctctgcctttgagaaatcaaaacagtgaggagaaaggatgaggcaaataaaaaatcaaaacatgtgtggtattttaagaggcactgtctttatattttttttccttaaaaagagaagctattattgtttagggagtttctattataataaatatcaacaaaatggtttgtttgggagttcaaaaaatacgtgcttacttgaaatgatttccaggtaaagttttataaaattactcttgccttattatattatgtacatttttattgtattaaaatacaaattatattacatagcattataaattgttattaaaatgatctgcagcataactagcagggaacttacatataactgtaaaaactgaaataaaaatctattaatgcaataaacctacttaataaaagttactttcatattcaaaaacaaaatattaaggcatgcttcagatctgaaagtcaaaaatgagggaataaattagtgaaggttaagaaccttgtagcagctgactaacaaagctctaggggattataaaatttcatgctcttgtaataaaaaggataaaggattggccagaagactactaaaagttaaaataaatgaacataaaggagatgaaaaagtctgacatgagtgtgaccactaatgtgtaaagactaaagacatggtattaaagtgttagaggctggaattaaatgcaaaatgaattctggtggtagattaatagaaaattataaaggtaaatgagttcggtttcatggtttcagaaaactttatatatctcattatttttcttagcacttaagaagaagcagggtaagacaaattaaaatttggcataaaccatattgaagtgggtggaagtgccaattatcccccagtgctattccctgcgtattccccgtgattgacctttgcttgttaagtggcacatggcagccccaaacaaagcaatttttcccatctctcctgttcataagtgagaccatggatctaagttctcattcagttagtcttaagaggaagtgacagcttccgggaaatatattcaaaaggaggtggtgggtgcttttatgtctctggctcttccttcctgatggctggaatgtcgttataatgtctggtactccagcagtaattttggaccatgaggtgatcatagggatgggagctgtacatggggaagcaacaaggcagagggagcctggaaccctgcccctctgtccaccatgtcaacttgggcctcccagtgccagacttaggaaacatcacccactgttattttgggttttctatccttgcagtcaaatactaatcttaataaagacagagtggacttctactatctccaggcctgcagtgaaacacaggatataacaataccagctcccttgtcagggttggggttggaggaggggctctgaggatgtgaccactgtgttgattggtgctgatgctggaaatgagtgttccactataaatcagggtctgctccaaaactcagaacaagagataccgagagagagcaacctggtggggtgatggcatttgtttcaaagctgaatttacattggtagaacgaagaatttaggttgcattgcagatcaatgtaaacagctatttggaaaggttgcttttcatcatattttctttagatcgagaaaatgtcaattaatgaaaacagatgctttactactgcttatttgtggtgacttttgaggaagaataatggattttatgtgggggaggcaggctcaagccctccatgaactccacccgccccacatcttgacccctccacagctataagcatttttcctctttgccttgacctttcccaaggcaacctagcagaacagttgaaatggcacttcgttgctcttaaggaaacaccccaacaccccatacctttgctataggtagcatttgcccttgatccggagtagatttgccaaaccattagaacaactgctgacctgtatagaaattcttatggtctgaaattaataatggtggaactttctcaggactgttaggaaaagtatcttttggcttttctttttatgtgttctctaagaagccatcatacattgtgcctcagcctctgcaacccctgaacctgctctgggtattcatagcacactcttgactaatgcttacctctgtctttgcatgcaccgggctgcattctagtccctcccttccacgctccctccctttctttcttctttccttctacaatatttacttagagtctacaatatttatttaggcattttctaagcactagaaagatggcaggcaacaagacacattaaaacagtacattccttcatagtttcactaagctttggcccttgaatgcccttagggaagagtcatttatgactttagctaaggtttaattttaatatattaaaatgaggtcaggatgcagaaggggagcccctttgtcaactcgaatccagattttacatgatccttgaccttattcctctgatacacctggaaattcttgtgaaagtaacaacaacaataacaaaacaactacaaatttgcttgtgttgacaaatatgatatgaacaagaaaaacctacaggtgatgaaagttgaaggacaagtggagatttaaaaaaggtggtttttagttagaaaatagagcttttaaataaattgaggagtggaagaaagtattcaaatgatgtcttgcgtctatgactttgtttctataaatgaatgtagataaaatatttggaaaacccagcccagtcagggaagacattagattttaaaacagagatagataactaaagactcaaagaatggaggatccatggggcatctggaaggtggaaattcacaaaggacatgccctttatcaacataggatgggtatccttcaggatgggctaggaagcagcagtaactaacaaccccaagtatcagtgccttaacacactaaagcttatttcttgcttgtgccataaatgcagcaggctatctaggtggagtgggggaaacactctgctgatagcagtcacccatgtacctaagttgaaagaagcagcacttcaacagtgaccctcatcactgcaacagaggaccagaatatggtaaatcactcagtgcctcttaaagcttccacctggaaggaacacctgtaacttttgtctacatttcattgtctaacgcaaaccacatggccatgccttcccttagggtaggcaggggttaccatcctaccacgtacctgccaagcagagcctctgaattcattgttgagctgcaccaatgtctatagcggtgtgtgcacttaaccccaaggatgccagtctcccactgcacaggcagctccttgaaagcagaaacccctcatacagctcctcaatcaccccgttcagccaagggcttggcacataggaggttttcagtaaatgtttgttgtactgaattgatctccattccacgtacttcccgaaacctctcatgatttattggtaaaattttcacccttaattagtgaaaaaagaaactctttctatgagtttataaattatttaccttacaaagcccttctgagctcttcgagcacactgtaaataatttatgttcatacttgtgtgatttcaaatttgtttattaatgttatcttggagatagaaaacaacctaagtgaaaccatcctaacttattttacagatcacttggaacaagaaaaaaaagtgcttttcttctcatgtggaaatgttattgacccaccattagagggtgtgaaggcccagttctttcccaatgttaagcaaatatttctgctggcctgagccatgacattcacgcccatttagtgaattcctactctatccacgtaatgaactaacacgttgagtctatagtactcaatatatccagccctggatccttctcctgaacctcagcctgtttctccaactgccctctccacatctccacgtggatgcatctcattaacactgcaaacttaatgtgtccaaaacagagcccttaatttccagcctcctacctcacagctcccaaagtcttttcccatttcagaaactgcaaactccatccattttactgcccatgtcacagaccttacatatagctttgactttgtgccttctctcatgccccgtatctaatcttctgaaatattgttggtgccaccttcaaaatatatccagactccagtcgctttttaccatctccactgacaccaccggaagccaccctgccttgattgcttacctggtttgtttgtagtggttgaaacgggcattccgtttctgtcactggcccttgcactcgacttctgtgtagcatccaaaggaagccttttgaaatgaagtcacttctctgctcaaaactccccagtgccttctgtttgtcaagccatggaaaagtcagagtcctccagtggccgataagggcctacgtggtttgcatcccatgcccccaactgctcctaccatcccgtgtcctatccctcttcccctcacacactctgtcccagctatggaaacctcttagggtttatgtgaaccttctgtgaacattccagctctgctgcagctttaagacatttgtgtttgctgtttcctctgacttaaatggtttcccttcagagagccacatctttccttctgcccatggctctaagtctctgctcaaatgtcaccttgacactgaggcctgcccagacctgcctacctatggggcaaacatgtcctgtctccttcacattgctctctctttctccgtaacgcctgtgtatttacttgtttatttatacaatgccccccaggccctttctagaatgtaaaaatagtgcaggctgggctttgatcatttatttcaatgctgtctcccagccatcaaatagagatagcccgtagtagaagctcaataaagacttgctgaaaaaaaaattataatatgtaattttattgttcatgagttatttctcgtcattaagtattagttttccaactaaactacaacatcttttcagcagagactaacatggattccttgtaattctctttgtttccaaatgcaaaatggtcagggaatagattgctgatagttgggtgatgtcttccacttttccaagagggttgactcttcttgcagaacattcgtcaccagagattgtctttaaaccaaagtgtttatggcttagaatcttgttatgcaaagttagaaatgcagattctcaggcctcatcccagaccaatgacatttgaatctgcattttaacatgatggaggccagtgcctgctcccttcacgttcgtattcacaggaatcccctggggatctgatgaaaatggagattctgcatttcttaccgactctctcccaggtgagcccattgcagctgcctctgagtgcactctgagcagtgagggcttgagagtctgggaaaagctttacccacacttagacattcacagggtgtgtccatgtcttgggctctgagaagtcttgcattcgtcgcattagaaaaaaatctagtcggccaggcgcagtggctcacgcctgtaatcccagcactttgggaggcagaggcaggcggatcacctgagatcaggagtttgagaccagcctggctaacatggtgaaacgctgtctctactaaaaatacaaaaattagccaggcatggtggcaggcgtctgtaatctcagctactcgggaggctgaggcgggagaatcgcttgaacctgggaggaggtagaggttgcagtgagccaagattgcacgattgcactccagcttgggcaacaagagcgaaactccgtctcacaaaaaaaaaaaaaaaaaaaaaagaaagaaagaaaaaaagaaaaagaaaaaaaatctagtctagtgtttcccaaacatatttggtgacatcagtgaacatcatgaggaccagtgtttctgagcacaggttttgagaatcctcctcccgttctttattcccgggtctcctctcctggcctctctctaggtgccgtgttgatttttttttttaatttaaatttaaagatacctcttccagtatagctttcaagctgagcctggagacatctccagcctcaccccacttcacttcgcccttgagtcgatcctctggcagcaccagctgctcccttggctgcacggttctttcctgttttatttcactcagacagatctttcctctttagggtgctctctcctcatcttggtttttccagccttccgcaattccttcagtctcagcttgggtgccctgtcctccatgaagcctgcccagatttctcggatggactaagtgcccctttgctttcactccctggtggggagtggggcagttggacctccacggagcactcatcgtgctctctgtggccatctactttggtttctgtccctgctcaagatcctgagggctcctccttgagggcaagctcaaggtctcctcatttatcctcagaactttggaccttccaaagtacgtattaggtaattatctgcatggacctttaaaactgaagctgaaaacatgtaccaaatccacccttaagaaccccccctcccgctgccttagggcttggaggcaacaccagtaaaaacaagtaaaaaacggggcagggtttatttaaaaaaaaaaaaatggtgtgaagagctcaaagaaacatcaaaagtcaatttttcaacgatgtgcaactctccaagtcagaaaaatttaattttaggaagaataaggccaggatggattgaaaatggaatgatttgaacatagaatgttttggctccaggggacgtaataaacagaggacagagactccaaaggatagagtgccgagcattcacagaagcaggggatgcataacattggagcttttatccaataccaggatgtgcattcttggttttagtaatatgtatgtattttaatgagtattagaaaaaaaattggattctcctatttatggtcacactatcataagtttcctgacttaatgcttttatttgattcaggtcaaagaaaaaagtataaagacaaattaggacaggtggtatgtgggtggctgatataccaatgactgatgctgggaaaatattttaagaaactggactggtgattgagaaaccagttttcctgccctttggatacacaaacttgctttgctgttcctgttgagggatgtttgaattaagtgatgctgctccttcatatagctgattggaccaagggtgttctcctggcctaagttgggccaatccgattctccttttcaggagtttagctttgggacccagggagacctaatgagaattccgagtgtggtgtggtgacttggttgtcctgtggttgccatattttgctatgtgaactgagaagcttagatagctatgagatatagaagggagagtgagatacagaagggagagagggatacagggaaagaaaaataaaacagatgcacagagaaaagcagaaatgacaggcagaggccctggtcacagttcttttccagattcgagttcctccctcgtctggctgcaatcttaccattgggttttctgagacacactaccatgctgataacaaatctccacctaccaacccacttcacccccagcacttgtctcttaggcttctttgagttactactgttccttgcagcaaaaaccctctatcaatgactatcaaacaggtaacttaccttctgtggacctcagttacttcatctggaaatggcagaagctagctagttttcccgaaagtcaggtcacacaccactggagtaaattgagaagactctaggtgatatttaggtccaacaccaaatattgttgaattgcatagtgattccatttctaaatgtcttccagtccttctgattatatgtcaaggagaagttcagttttattctagtaggttttcttaaatgcttttctaatgctttttctctttttaacaaagagaaatgagacttcagatagggagatttaaaggctataatagccagttagaaattggaattttttttcattgaattcattttttactgttattatttatcataaaattattttaattctggtttttcatttatggtagtgagatacaacttcctttaaaaataactttaagatggggagagaaaaaccagctattccttacagtggaattccaattataaattctgaatgacagaaatagaaagtcaccatttggccaacaccacagtaattattattgcaggcaagaatcatcagtgaatgctaaaattagtgggtaaaattaaggtgagaaacaggatatttgcatagtctcatagactaaaagaatctccccagaaggcactatttagtacaaaggaagaaataatacctttacagtggagaagaggctgacactgctttcatcaagagaccaaagttaatagtacattaaacacccctgatatgaggcactgagaaggcgcagcaccactgtcaaaaattgttgacttcaggctaatcatgagtaaacatcagacaaatgtaaaccgagagatattttacaaagtagctggtcagtgctctttgatcatgttgaggtcctgagagacaaaggaagactgagaacctgtcacagattggaggagactaaggaggcatgacaactgcacacaatcctggcgtggatgtgctttgaatcctgggttgggtcttggtttaggtcctgggttgggtcttggtttaggtcctgggttgggtcttggtttaggtcctgggttgagtcttggtttgggtcctgggtggggtcttggtgtggatcctgggttgggtgttggttttgatcctgggttgggtcttggtttgggtcctgggttgggtcttggtttgggtcctgggttgggtcttggtttaggtcctgggttgggtcttggtttgggtcctgggtggggtcttggtgtggatcctgggttgggtgttggttttgatcctgggttgggtcttggtttaggtcctgggttgggtcttggtttgggtcctgggtggggtcttggtgtggatcctgggttgggtgttggttttgatcctgggttgggtcttggtttggatcctgggttgggtcttggtgtgggtttgggtcctgggttgggtcttgtcttgggtcctgggttgggtcttgtcctgggtcctgggttgggtcttggtttgggtcctgggttggatcttggtgtggatcctgggttgggtcttagtgtggatccttggttgggtcttggtttggatccctggttgagtcttggtttgggtcctgggttgggtcttggtttggatcctggattgagtcttagaccagaaatgacattgatgggcatttggttatatttgagtaagatctgtaaattactgaacagtattatatttatgttaatttcctgctttttaataattggactatagttatgtgaaatggaagcattttgggaatctggaatctgggtgaagagtgtacaggtatactagttttgcaacttttttccctctaagtctgaaattatttcaacatgaaaacctaaaacaaactgtaaaaatttcatttcttcctagaccaatggttcccatgtggatcaattatgccttttgggggacatctggcaatgtctggagaaatctctggccgttgcaaccagtgggtagaggctagggatgctgctacacatcctacggtgcactgggtgcccccaacaacagagaactatcgggctcaaatatcatcaatgctgagattgacaaactgttctagaacaactgttctagaacaaatatattttttaaaaataatataaacacaagggatgttaagagaataataatataggagttgtgtgactatactgcagctgctatacaagtgtctgaacctcattagaattgattctgcatttctacctgggactaacattttggagtctatgaattcaggggcagtgtcattcaaggttagaggtgccaggtgggaagctttgtgactgctcactgcaagtggccatcattagtaaactattttctttctttcccttggtccaaagcgagtacatcaatctgaccatttctaatgagatataggatgatactgcgtggacaagacttgctgtcagccactgcctggtgggcttagagaaagaaacgatccttcattaattaaccttcactttctatgtagattcactcattgagatgcaggtaattaaaccaaggtcatttcaaggactgacaggaggaaaaaaaccccagccgttggaaggcggtgcagtttttttgggtagaggacttggaattctatttttatcttgtgcagaattgtggaatcgtcttttcttggcttttaaataatctaaccttgttttaatgggagattcttaaattcatctcaaaactgtatctcagaaatttttaaagatttaggttattgtaggttatagataacctcctgtgggtttcaggaatacatgttagggcaaaaatttaatttaggggagctaaaccatgtaaaggaagggaaatagaattatgtttgagagacgaagacccattttattggagggaggagaggagtgcgattgctattctctcagtttgaattctgcagttcttgatttttattgcttgtaatattgggcctgtatgatatattatagtggttaagaacatgatttagagttgggtagatatgatttcacgtcttagctctaccatagactcggaccctgggtaattcatttcacttatttagctttggtttcctcatctgttaaatgggtctaatgctggtccttactctcagggttgttggcaggattcactgtaatagctagaaaaggatccattctcagggtgcacatagggatgatagttacctcttaagaaatgtttgctatgtgccatgcggtattccaaggactttactgccttccatcaaccttctgagttaggttctgttattgtatgttttatacatgaggaaactaagacacagagaggacaaataatttgcccaagacaccacagccattaagtagcagagttgggagttgaacctagttgggtggttgatctttacacccacaccataccatctcaagtgcataaactgttggctcttattattagtatcatccttcattataccttaaaaatacattgctaaagcaaatccactcaggcatacttttctcttggggaaaaaggtggttcttgggtggtagaatgaatgagttccttgaggcctacaatagtcatatcacaaatttaagagaatgcccatttggcttattaataaaaaatatgtaattgccattggggcttatcgccacctcgtggcaggctgaggcatgacaagacagccttggctgccctgttggcattcctgcaaatttccttttctatccgggccctgaaaagaaaatgtgctttgaaaaaagatgtctgccatgtcacagtctcaaagccacttcaccatctgaagggaatgtatttggaattgaggtgttacattaaagttccagtattacaatagaagccaatgacatttggcttatcagtgtcccttaaaggagattgtatgaatttctccgcgtgcctggctaagcactttacctttaatcataaaggcgaaatgcttaatttgttaaacatatacagaatcagaagtagggccattcactgtagctaatatcgcttgcagttattaaagtcagtttttatctgtttaaacagatcataaaaaagtaaaatctgaaataaaggactaactccctccttcctataatatttaatacatattcaaaattccgattaagaatcagtgcaaaccagaagagagagaatagcttaaaaggcagaaataaagtttcagtttaaccactatttgtgttctaattaaggctggccaacctttaaatgatgcagtgtttttcattaactcacacgaaaatcatatcaaatcagaattcttcctccactacaccccaacacattctttggtgttttataaaacagcaggctcatttctgtcctgtcttgactactcccaaccatatgtaagctgaggaaatgcctctaatttaccacacttttgtttctcttatttttttttgttattcttactcttttcttccattttatgatatgcaaggttcaaacaatcctgcatgttagaagcgaacattactctgtgtgcagtctttggctcttgtaacataaatgtaaactgcttgtcttatggcagaaatacctcttaacccttcaatattaatgtattttattaatttaaaaattacaaagaggactactgcatgattttgtaatatttcatgaagacatgtatagaaacctctatccttccacttctaatgatatgggaacaccagtgttaagagcttgatgtatgtgggtctctattgttgcctgtgcccatacaaagacacacagcatatatacacacatttaacctccctgtgccctggcacctgttatctgtagagtgagggataataatacagatctccaatcttttttcatacttttgaaacctaaaaatctctgaaaatcaaaagtttttttataactcatttggaagcagaacctgcctaaactgacataaggctatttatagtcattatttatggcagctagtgagaatgttcagatcttttaatgcagaaatagtaatgtttttgccatcccagaccccactcggcaggattagataatccatggtaagtgcttctggggtaagcagcctccaagatgacccccgatgatcccctcttcctggtatttatgcccttgtacataactctccctgtgaatgtgggctggacttgttggctttctcccaatgaacagaatatggcagaagtgatggaatggcactttgaagattagattagatgggatgtaattttcatcttggatgccttctgtcatcctctcttgaattgcttgccctgggggaagtcggctgccatattctgaggtaactctgtagaaaagttcaagtggtgaagaattaaggtgagctacagctcagtgagattgaaagcagatgctcccagccccagtcaagccttcagatgagaccacagccctgggtggcatcctgactgtaaccaaggtcaagaactcttgagatggagccacctagctaagctgctaagccttgcccggattcctgacccttaggaactgtgagataatacattttttttgtcgttattttaagctgctaagttttgggcattttgttttacagcaataggtaactaatacagcactatattactttctaaaattcaaagcatctgacttacaaaacatatctggccccaagactcagatggctctgtagtacctacttcatagggcaatacttgttaattgcttaaaatcatgcatggtacattgtagtagtcaataaatattagttacttttaatcttaccaagatttttttctgttgatttattaaatgagattgtaccacttctttggtttttggtattatcacttaccaacacattattctgcaacttgctttcccccacggcccccccaccccatttaatagtattttacagagtcttccaggtcaatatagatatagattttagtcatttaaaaaatcagtcaaattccttactgatcagctttttttttttttttttttttagttatttttttctttctcattattccagttatttttttctttgttttggccactatagacaatactgcaaaaactgtcttgagaatattttcaactcagctgagtagtccaaattcaaatttttaaagtcagctttatagaggtatgatttacacacagtaaaattcaactcttttaaaagtgtacagttctatgtgttttgacaaatgtacacagtcatatagactaccactgtcatcaagctatgtaacaattccatcatccccaaattcaattttgtttaatatcttttgttttaaaaaggtagcaactacagaacaatatcagcgcaacattgtaggctataaccatgtaaactaccctccctctactccaacgttaaaagaaaaatccagccaaactgaaatggctcttcaattactcccaagtttttaaacctttgccaaaagtgtttgagcttaattaagttaaaatatttcaaagggagcccagttgtaataatttgtttataatacaagcttccctttgatcatgaatgttcacttttatagaaaccctgttatcattcttgggataagggataaagtaaattaactttgcgttggagaaaaaaaacacaggaaattaaagaagtacctgaggtgaactgccttattaataacagaaagatgtgactttattgagccattgggccagtggggtggaaacatagagtctgtgggggaatagtgtgaattgcttagatattatggatacagtttattaaaaagatagctttaaaaaatgcgcttaatatccctctttctggtcccagtgtgaaccctcctggttcttgcaaaagacaaacattgccttgagaaagttagcaaacaacggcgcagcactctttcttaatttggctggaagtagctggggaaggattttacatctgtgctggtgggcgtcccaggacagaagaaattcagtgccacttttccaatccttccttcttacttgctttgaagagaaggtatatatatttcctctaatcatatttaaaattctgctttcaggctctccctttccctcctactatttccttccttttctcagcttaattttgttttcttttgacaaatagtcagaattaaaaaaaaagatctctatattaactttaactagagaatagctgaggtgctgagagcattctgagctggactggactagaatttgcattaagatactggcaatgagatgtagaaagaacaggagatttaaaacatatttttgctggagacctggtttctgatgccagctctaccacttaaaagctgtgagcatttagagactttacttaccctctctgtaactcagttgactttattcatgggattattagaaatgtcaagagaattaaggtgtgtgaaaagactttgaaaaccattaattacctgtacagaataaatgatagaagaagcgtttgtggaatttaagtgataggacttgggttgtttcctgggtctgccccctcatgacctacttaatttctgcgagtctcatattcttcttcttcttcttcttcttcttcttcttcttctttttttttttttttttttttgagatggagtctcactttgttgcccaggctggagtgcaatggcatgatcttggctcactgcaacctctgcctcccaggttcaagtaattctcttgcctcagctccctgagtagctgggattacaggtatccaccaccatgcccagctaatttttttattttttgtatttttagtagagacaggggtttcaccatgttgctcaggctggtctcaaactcctgacctgaggtgatccacctgcctcggcctcccaaagtgttgggagccactgtgcccggcccagtctcgtattctttacaggtgaaacggggaggataccttctcatgaggctgctgtggcttttacagttaatgtaagctcaagtgttctgtaaactctaagcaagagttgggaaactttctgaatataaatactgaatgtttgaggctttgaaacctgtatgtttctgttgcaactgtttaattttaccattgcagtacaaaagaagccacagacaatacataaatgagtcggtgcggctgtgttccaatagaactttattcataaaacaagtggcaggccggatctggcttcacctgccacggtatgctggctcctgttctgaagcatatgatgcagtttcatcgaattgtcctagtgggtttggaggctgtctgtaactactcttccgcatttagcctctcaggttgccacagagaaaatggggtggtgattatgagctagtggtgtgtgatgtcaaaatgctgggaagtgtgaactgcgccataagctgtgtggaggctctgaaggaaaaatttagtggcctccatacctcaaatctgtataccaagagaaattacaaatgaatgaatgaataatgaaattacaaatgattgggtaatgaaattacaaaggaatgaacgaatgagtgaaggaatgaatcaaaattgaattaatggccaggtgcggtggctcatgcctgtaatcccagcactttgggaggccaaggcaggcggataacctgaggtcaggagttcgagaccagcctgaccaacatggtgaaacaccgtctgtactaaaaaatacaaaagttagccgggtgtgatggtgggcacctgtaatcccagctactcgagaagctgaggcagggagaattgcttgatcgtgggaggcagaagtcacagtgaggtgagatcgcgccactgcactccagcctggggacagagcgagactctgtctcaaacacacaaacacacacacacacacacacacacacacacacacacaacaaaacaaaacaaaacaaaaaactgaattaacttttcaatgttaaaaaaataaggccataaaagcactagaagaaaccaagagatcatttctgggtaaccttggcctgagagctgacattttccatgtgactcaaaatctagaaaccgtaaaacaaccccaataaattcaagcatattattaaaaatatgtgtgatcaaaaataccaaaagcaaagcaaaatgtcaaatgataaactgggtaatagtgcaacttatgtcacagacaagaagttaaccttttactatacaaagacctcctagaatttgataagaaaatgaccaaaaatctaaaaagaaaaacagttaaaggataataacagatgatccacaggaaaaggaaccataaaggagaaaccaagagaatagaaaccaacaaaagccctgaggtggttgagccactgaattacctggctttggaagtacttacgtcgaaacttactgttatgagataaaaatgcattttgtgtgaatgattttgattctgccattctgttatttacagcccaaagcatcctaattgatacagaaatgaatggccaggagaccctttctcaatagtaggagagtaaataaagtccctggaacttagattcctcctctcccctagagagaaaggagaaaaagtagagaattcggaagtaaccgaggttcaacactaaaatggcagattagtcactaatttaaatgcgttttcttagaaggaatctgttggttatttacaaattacttccaaagttagcagcttgaaacaaaaaatatttattatcactcagtttctgagaatcaggaattgagtagtggctcagtggaatggttctggcttagtgattctcatgaggttgtagtaaaaatgctggccagggctgtagtcatctgccagtgtgacagggacgtggggacagaggacctgcttccatgatggctcactcatgtggctgtggtgcaatctctcagttccttgaatgtggactccccaactccccccatcaagccatatgctacttgagtgtccacataacatggtacctggcttccaggacagacaaagcagaaattgcaagcatcttaggacctagtctcagaagtcacacaccttcatttcaacaatatcttctaggtcaggggtccccaacccctgggccacagactgatactggccccgtggcctgttgggaactgggctgcagagcaggaggtgagtagtggatgagagagagaagcttcatctgtacttacagccactccccatcactcacgtgaacggcacatgttagggatctaggttgcgtgctcctcatgagaatctaatgcctgatgatctgtcactgtctcccatcaccctcagatgggactatctagttggaggaaaacaagcacagggctcccactgattccacaatatggtgagttgtataattattttattatatgttacaatgtaataataatagaaataaagtgcacaataaatgtaatgtgcttgcatcatcctgaaatcatcacctcctccatcccctggtccgtggaaaaattgtcttccgtaaaactggtccctggtgccaaaaaggttgggaacactgttctaggtcacacaggtcagccctattcagtatgagaggggactacctaagctaggaatacaagaaggcaaagatcactgaggccatcatggcagctggttaccacaaacaactagattaggtttttctcttattgctcttggttaagttcaatataagaaaataaagaaaattacatttatatctgctattgtaaggtttatataatgaatatctctcaataggcttgggatgagagctgggtcatagataattagacagtgagtacatcttctgaggagattctgctgtgaaagttttgtatgttttgtgacgactggattcatatgttttgctaggtaagcagggatacattttgcatcatgtttatgtattttcagagcttattctgtctgactatctcactattttataaatatgggccttagaatctataagcaaagacagaacccccctcatcataatttctggcaccatctctacaaataaatgattgatcaattaactcctgaaattcccatattatagagctgggcccaggtaatttatcttgaaaaattttcaccacaggtgttactgtcacccagtgcagcagttgtaaaaaatctcaatgatgcttttgtgaatcatttgggtttaagcaatgagcatcacagtgaactcacgggaaaatattaattgcaaaatgtgcccccaagtagctaagtaaattaacttgctgcatgggattataggtgttaaaccaattaaagtttagagagcatctgctacaaataatgatttttcttttcaaagtagttaatattgaggcatttctaaaagtagctaaacagcaggaccaatagtctatttagatggattcaaacttgtgtccagaaattaccatcaaagggtttagaagaccctcgtcctcatctgtgctgtagcatttattcattcttccaaccagtatttattgaggactcaccacgtgtcaggcattgcacacaggagtattgatatggtttggagttgtatcccctcccaaagctcatgttgacttgccatccccagtgttggaggaggggcctggtgaaaggtgattggatcatgggggtggatttcccccttgctgttaccatgacagtgagttctcacgagatctgcttgttgaaagcgtgtggcaccttcccctactctctcttccttctgctctggccatgtaagatgtgcctgattcccctttgtcttctgccatgattgtaagtttcctgagacctccccagccatgcttcctatacatagcctacaaaactgtgagccaattaaacctcttttccttataaattatccagtttcaggtgtttctttatagcagtgcaagaacagactaatacaagtatgcatacagagtcctaaaataacttcatataattagaataattgggacaaaatttattttaaaataagagggtagcaggggtatggaagagagctgtaacaaaacttttcttttaagctgcttgacattatttgattcaacatgaacccactcctgataattctttctatttgcttttaggaaaatgcaaacctacctacatacatacaagtgtgtgtgtttatagtgtatcttccagattgccatgagcatgcatgcattagttttgtgaaatattaaaaaaatagaaaaaaattagaaagactacaagaatatttacccataatatcaccatatagccattgttaacattttattttatctctattacaggttttttctatctccatagaaatgcataacatttaatgaaattggcatcatactaaatttattacttcatgagctgtttttaaaatcaatagccatgataattctccaatgtcataaaatagacttaggatattttaaatgttctcatttgctaattttgttggttgttgccaggtcctcactgttataagtaatactgcaataaacgtttttggaaataatccttgcttgtgttggacacacacaagtttctaggagtggatattaatattttaatatgttttaagaacagtgataattctggttccaatttatacttccatcagcagagcatgagtgcctgtctcatagtgacaccctcacccataataaatatcatcttttatcttcatatttgccaattttattcacattcttttacttcacaattattgagtataaagttgaacttttttttccatttttattggccacatatttttttctattataaagcgtctgcttatgttctttgctcatttttcaaagggaggcattctttttcttattaatgattaataagaatatcttttttgataagatcataacttttatcacatatattgcaatatcaggtaatacctggccacttgccttttatttttacttatggtatttttgacatatatataattaaacatgtttaactacgttgtacaattgtatatctaaaaataaacattaattaaattataagtaaaaaaattcaactttgttctgttgcatggatctaacttgaaattgtctcttcttcccaactcctccagacccatttattggatgatttataatttcacatggacttaattgttgcctcattgtaccccataaactgttaccttgaattagtctttgcgctcacttatcagttttctatttaaaaaaatgtccagtctttgcttatttgcttattcttttagtctgttttaactgggctcagagacctactcagattaagccaggaaggaggaatttattaggagaatgaatatggtttggtgttggaactgaatgggcctggaccactcttctgtttcttttgtggggatcatggtccatctcttgactccatagcccttacctctgcctatggtttgcctgctcactcacaatatttgctgtttctcagcttatagagaggcaccatcttgacctatattggattggagaactgatagcagcaggagagggagtggtgagatggatcaggagtttattacagcttctggaaggagatgaccatgtgttggaccagatggcagccatagagagaagtgctggcaggatttgagatgtattttgaagtttgaaacttgaggcatatcctggcgaggcttgctgagagatactacatggaggctgagggaaagggatggattaagatctttaaaaattctaaaagtaatgtctattcattgtagaaaattggaaaatataatgaaagcacaaaatttttataaatctctaatcccattataaatgtctcaagctttgatatatcaatggaaatagaattacctttctacctcttggcctggattaatttaaaccaaatatggagggtggatttagggtgacttcccttacaatacgagatatgtaccatttacaaaacccacttttgaaagacaacttgaaaaagcaggtgatcattctgtaagaggttgaaactaaggtagaatgtggagctaaaggtgcaccaggagagatctatgtacttatgaagatactgtggccagaagaaatgagttttcaaatatggatccatggttgaaggtttcagttgtatatgtacctatgcccggtgttgattgttttgatgaaacttttcttacctgggctgctctatagaaagctcacaggtaaatggcaaccaggatttcatttttttttttttttttgagacagagtctcgctctgtcacccaggctggagtgcagtggtgtgatctcagttcactgcaacctccgcctcccgagttcaagtgattctcttgcctcagcctcctgagtagctgtgactacaggtgcacgcctccatgcccggctaattttttgtatttttagtacagacggggtttcaccatgttagccaggatggtcttgatctcctgacctcataatcctcccacctcagcctcccaaagtgctgggattacaggtgtgaaggatttcttaatataatgttgtttggctaacactaatgaggttaagtaatttacttacatctatttctgtatctctctatacatttctatttcaatattaatataattgtgtgtgcatgtgtgtgttaaagccagcattgctcatcaatattatatcacaaatattttctagccagcatttctcatcaatattataacacagatattttctaactgatcgtcgctggcatattctcaacatttattctgtatccagtcaatttactaaactttcatttctaactttttaaattgatccttttgaattttctagaggatagtcatataatctgccaatactttcatcttctactttcaaataattatgcttatcattattttctaatctaactttagtagccacatttcagaaaaaaatgtttaataatattgttaagaagagatccttttttgggggtcctgcttctggttttaatggaactgctgttagagttttaaaagtgtggtctcgtctgttgattcgatatagatattcttatgttttagaagttgacttttatctcaagcttgttaagagtgttttgttattattaaatcagagatttatcttgaattttatctaacacttttcagattaagatgagtaagattatgatgtttttctggtttacagtcatattttagatttattttgagctccaataagaaggttttttggaaagtaataatttttattttaagtacataaatttatttgtaaaatgttaattgactatgttttacacttcagaccttgtggtgagtacctagaatacagtagtggatgaagtaaacgttattccttccctaatggatttaataatctagatgggaaaacaggggaataaaggtataatttttgagtttgctgctttcttagacctgatttctggtggtcaaaattcttttaagaatagagttctaattttaaaatgggagacagtggggctgctaagatttaacacagagaatcttgcttttaaagcaagtggttttaggaatgaactcatcttatgatggaaaatacctattaaatttaaattaaacattttcagaaacatatttatgactctaggaaaggcaatgcaatccaaagctcattatttcagtgatgttcaaggctcattgatttcaaccaagttagcattcctgttttgatgctttggctaactctgcttatgttcctgttgaaagtagacgtatctcaagaaaaagaggttttagtatttttaatgcaagtgatttttccattaagatgtgactctcattcctagatcctgctatgacagacactgatggttgcctggacattacccatgtttccttcttatatactaagaaaattctaattgtctttggggaggaaatatactcaactaaaatactcaaatctaatacttccttgcagctagggatggccaattaacccagttttatctaatgagctgtaagcagaagggcttctaagaaaaattttgaagaaaatatttagacttggatggcacatcattttggccccttgcctttcccgttgttttctttcttttcctagaagacaaaacactatgctcagaggttcagcagccatattgtgatcataagaataaaacattcactctactaatgaaaaactggggtgtagaagaaccttgatctttgccgattcacatatgcagctaaagcagctcagaattgcttatctctggatttcttgttactcgaaaaaggtggacccatatgttatttgagctttttgatacttgaagccaaacatgtcctaaccaatgcacaggtagtgtttaaaaataaaaggaagaaaaaagtcctgccacaggatggaactagctccatcaggacaaattttgttaactaaattgacagtacagcagtccttccttatccaaagaggatacattccaagaccccaagtggatgtgtgagaccacaggtagtactgaagcctagagaatctacggtttttgatctgataactgagatggctacgaagtgactaaagggtggaatacactggacaaagggatggttcacatcacaggttgaacagaatgggaaggtcagagatttcatcatgccattgagcatgacatacaacttaaaattgatgaattatttatttctggaattttccatttaatatttttggatcaaggttgatcacagataactgaaactgtggaaagtaaaactagggataaagggtaactgctgtttaagagcacagattttcaaagtgcatgctcctggcactctttgtaaggttttgagagaatattgggaggaaatagaaggaaccctagggatctatgccattatttgaaaacaaaaactcatctggcccgagatgaaggggtaaggttaacatgatgctttgtacttagtgccttatgaataaacttctactgctgatcatacgagcaattcacctgtaagtcctaataacccgagcttcaaaggctcatcccattgaaaaggaatttccccgcctctgcaattcaaatgaagtaaatactcactgaactgtagacacctcctgctgcttttgactttcatcttaaaaaaagcaggagacagtattatgcgttgtagatctaaaaattcatttgtgaaaggagaatcttccttttaaaaggtgactgttattaattgcagttttataattgatcctttaaggaacacaaatgagttttaaatgttctctttcaatgcacctcaatgggtggaagggtgggtgtattgtctgggataccacaggtagaaccttaagtcttggccttgtagaaatcaggccaagatgaaactgtcttttgtgacaaaattcaacagtctgccttagacaaaaatcaaacaaatcatgaattattgctgatttggatgtttgttccctccaaatctcatgttgaaatgtgattcccagtgttggaggtgggacctggtgggaagtgattggatcatgggggtgggtccctcatgaatggtttaatgccatccccttggtgataagtgagttctcgctcagttagttcatgtgagacctggtggtttcaatgagtctgaaaagagtctggggcctcccatgtgtctctcttgttccaggtctcaccatgtgatacattggctcccagtcaccttctgccatgattgtaagcttcctgaggccctcaccagaaggtgaacagatgctggcactatgtttcctgtacaacctgtagaaccatgagctgataaaaccacttttatttacaaattacctagcctcaggtatttctttcctttgctttttttttttttttttttttttgagacgggatctcgctctgttgcctaggttggagtgcagtggtgtgatcttggctcactgcagcctccacctcctgagttcaagcaattcttccacatcagcctcccgagtagctgggattacaggtgcctaccaccacacctggctaatttttgcatttttagtagagatggggtttcaccatgttggccaggctggtcttgaactcctgacctcaggtgatccacccgcctcggcctcccaaagtgctgcgattataggcttgagccactgtgcctggccaggtatttcttcatattagtgcaagaatggactaacacaattactaagtcagcttcttagaattcttaacaattgctcttagttttcatggtcatgaaaccgactttcttcctttctttttttttttttttttttttgacggaggctcactctgtcacccaggctggagtgtagtggcaccatctcagctcactgcaagctctgcctcctgggttcatgccattctcctgcctcaggctcccgacttccttaattcttccttcctatgaagaggagactgacagtttgctcagtcctgggctacatggtcattctgtctgtagcatgcatctaggatagagtgagcaccagcaaaaaatgtcttagctgaacatctctttcagtcaaattaaaaagtttcttataaacaaaatgtaaccatggccatgagaatctccttagcagttctttatctttctatgggcacagacaggataatttttacaagaaagatgaaagagatccagatgttccctccccagaatagtgtcttataaaaatgagttttcaggctgtttagattattagcatgtcatagtggaactaaaaatctcttaactcatcacaagggccagaccttcaggatgatactgggaatttctcaatgttattggcaagaaaagcattcaatgaaaataaaggtttacaaagtaagaaagggaactcctagttggtgggcacctgccctgttataggcactcagtaacatgctttcagctatttatccacacaacaacactgtgaaaaaggtaaggtgtcactcttaaataatggcaacatgggccgggcatggtggctcatgcctgtaatcccaacactctgggaggccgaggcaggtggatcatgaggttaggagatcgagaccatcctggctaacatggtgaaaccccgtctctactcaaaaatacaaaaaattagctgggcgtggtggcaggtgcctgtagtcgcagctactcgggaggctgaggcaggagaatggtgtgaacctaggagcttgcagtgagccgagatcgtgccactgcactccagcctgggcaatagaatgagactccatgtcaaaaaaaaaataataataataatggcaacatggaaactcaaggtcacagctagtacacagctgagttcatgtccaagagcaggtggctgtgattgcaaaatcacattcttccatcaagccttcttggcttattctcattgtagacatcgcagcctagttggagataagcatataaacatatgaaatgtcaaatagcaacataaaaacaaggatattatgatgcagcatgtgattaattggcaaatgagtgttaggaattgtgagtttgtcatgaactacagtaacctagaaaggcctggcctctgtgtaggacttagataggttaaaatgaaaaccagacagtcataaaggtgtgaatcctgcatatagtaaggaaaatatgcgatcaatatattgttagtggatcagtttggctttaaaaagtttatgaaggagctcgaaggtagacttcagctttgaatttcaggctctctagaccctcattcagtaggtcagtgttactctgaggtcagtggactgcccttcctaacatcttgggggtcctagcacttattgtcaggattcctaagttctctatgaaactttgctttaaaatttttgatgaaaattagaaaacattatgagcatactatggagatcaaccctgtaactgtgcactatcctgtggtggtcttaccaagtgaaggctgaatgatatcccagcagatgaatgcataaagatctcaccattgtttacacagagaaaacatgtgcaaactgaacctgctcatatcatccattaggctggatatactagacctcctctgtacagtgaatgtccatccatgtgagtggatctcctgacttgaagccctgcagtgtcggaaagggtagctgttagtgcccaataaagaaataatctgcttctgggacagatactgttcgtgtcccctccaccccaccctactggcactaactattcttgtatgtggcgctgcatccacctgcaagcccctctgattcttcacctaggggctttctcttggtaggcatgtgtttggggcaggccagatgtgttaattttgggagcatccatccaccaatgacaaatgggagttggagaaaaaataccccagcttcctcgcctcttgggtgggtgaattctgaggcatgctcacattgtcttccaaagttctcaggagcactcagtcccagtggcctggagctgtcacctgcttattaatgcatgctgcattggcctttctttcttgatattgcttcctcacattgcttagcagtatgaacattatttcccagataaaaccctctatccaagtatttgtctcaggtttgcttttgagggaacctagcctaaaagccttccaaatattcatttggtaaagatttgtataacacaatgccagccttatctttacgtgaacaaaatagttgtgcagtgttatcaatggatgcctcaatacaactggcatgcaaggattattcccagacagacttttggttctgatgatcctgaattagaaaaaaaatgcagtgattaatacaatcttatacagcatgcttgtgagaatggctgttccttacattagcattattaaaactgaaatacagaaccagattgagtattcaaacaaacttgagactatattcttcctctattaagccaaatatcagtgattttgttccagcaaaataacatcatgtcacattaaattaatgttgggaatttaaattttattggttctctagttgtgcttgaatataatttaaaaatttattctagatttgtagttatatcaaagctgtcagaataaagagtttatgactagttttatatttatacatattgaaattaaattataatgaatttttaacattacattgagggtccataaaatatacgtgtgtgtgtgtgtgtgtgtgtgtatatacacatgtatatattcacacatatacacacacacatatacatatatgcacacacacacacatatatatatcttttaacccctttaataagagaaactcctcaggcctaaagaaaaacttctttaggtgactgagagacactaaaaggtttcgatcactgaggtgacctcatgaaaatggtgtttcaggacaaattaatggaaaatgaatttaaatcaagatcttagaatatagtagacagacaatactatttgctgaataaatgaattaaataaaagtaaaccgagttagaattctgttgcagcaaactataaaataaaacatacgtatgtaacctagagtgctggaattagaaaacagagacttagagaaccttgtgattatatacgggacatgcattggttccagctctgtcaaggcagaactctgagacaagggttcatgtacaggtaacttattagggatgtgactccaggagaaaccagtaaaatgtcagccaggtgtggtggttcattcctgtaatcctggcactttgggaggctgaggtggaaggattgcttgagcccaggagttcaagaccagtttgggcaacgtagcgagacactgcctctacaaaaaatttaaaaagttagctggaaacggtggcacacacctgtaggctgaggctgaaggattgcttcagtccaggaattcaaagctgcagtgagcgatgatggtgctattgcactccagcctaggcaacagagtgagactctttctctaaacaataacaacaacaacaacaacaacaacaacacaacaacaagtgagtgaagcagacagggagggggaggaggccaagcaaaggtatgattttaggcaaagttcccagagagtagcttaagcctaatcctgcagagaaactctcaaatggaagtgatacctccaagtcgatcccagcttgagccaagggagctgggctttcctacccctgcaccagccagtcactggccaagggcttccatgtgaggtacgaacttccagggcttccagctttctgtagtcagagagcagtcttacagagagagagtagcaggtgacagcctagcagcagaagcacctataagctgggggaagcgtgcacaggaatgataaaagcagcagtatggagtatggagtggtatggagtatggagtatggagacataccagtgttgaccatcaaaactaagcagtcgaaggtgatttgagggctctgacctgtgatgtggccagtggatgtctccattaacagaagaaaggaatttgatcaaaaccacaacgtaataccatcttatccccccaagaatggccataataaaaaataaaaaaaaaaagatgttggcatggatgtggtaaaaagggaacacttctacactgctggtgggaatgtaaactagtacaaccactatggaaaacagtgtggagattctttaaagaactaaaagtagacctaccatttgatccagcaatcccactcctgggtctctacccagaggaaaagaaatcgttatatgaaaaagatacttgcatgtgcatgtttatagcagcacaatttgcaattgcaaaaatatggaaccagcccaaatgcctatcaaacaacgagtgggtaaaaaaactgtggtatatatacatgatggagtactactcagccataaaagggaattaatggcattcacagcaacctggatgggattggagactattattctaggcgaagtaactcaggaatggaaaaccaaacatcgtgtgttctcactcataagtggaagctaagctatgaggatgcagaggcataagaatgatacaatggactttggggactcggggaaaagggcaggagggggtgagggataaaaggctacaaattaggttcagcgtacactgctcaggtgatgggtgcactataatcccacaaatcaccactaaagaacttactcatgtaaccaaacaccacctgttcccccaaaacctatggaaattaaaaaaaagaagaagaaaggaatttgagaggggatttgggaaggagatggagagtcacagcccttggattttttcggggagtgaaacatcctctggatctatctccatggctacagctcatcttcaagctgccctcctgtgttagccagatcacagtaagagcttcctgtgttttcctcagctttgatgttgttgggccctcctgccttgtctgtgcactacagctagaatcatcttcttaaacttccaatcacatggtattacttccttgctctgaaatccttcagcaacttccagtttcaccttgaagatcccgagtcaccatcagcctcttccactctgttctagcctcactggctttctttctgctcccaaaagaggccaagttcatctctgtgccagggtctttgtacttgcttttccctctgactggaatgcttccctgttagcctcgcaaatgcctggtctctgcacatccttcactcaaaccttctcttattggagaggctttttatgggggttgtcagtgccgctcaccatgcttcttttctgcattgtctgggcatacgatggggtagaccttgctggctcccttgtgtccgggtggggctggatgtctgcttctggccaatgcgtgctgagtgcaagtgacatgtattagtttcaggttagagcatttaactgcttgtgtgagaccctccagagtttttttgcttctgcctcaggacaatactgtgaggtcctgtaatagctactgtgccagcctgggtcgctgtatcagttaagagtttgatctgggaagtagaaccagttgagtcatgtggagtaagggatttattagagggattagagcttacacagttgtggaagttggtcaagacatctctggaagatggttgcctctgtgaacgggtttgggcctgaagtttgttgtaggtgcatgaagaaaagctggatgtaaagtggggaagaacagagataattggatgctctgaggatggcctggaatccatgtctgtctctcaccacctccacgctcagtgatgctggtgacctgcagaaggagctggtctccagtgccgtggcgctgcaggtgcatctggttcaggaccctaaaaatgctgaataagaacactcagtgggttcctcacatctgctgtctagatttcacatgtttccctgtggccagctgtaatctgcaactacacacacaaaaaagctctaagaaatgtagttccagataaaataatttgcagagtacaaaactgcgatagtctggagtgactacaatgagtagagtttccctaacaacttcggatgggcatgtagcgtgaaggaaagaccaacctttgctgttttcagcctctcataccagggggttgtttgttaccacaggataacctggcaattctgactattacatctttcctgagcattgtatgtaaagaagtgtatcatcctctcaagttggtctagactatgccaagcagcttctttctttcttactacttacttattactatccaaaattatcttacttatttgtttgcttttttaaaaaaatgtctgcttctcttcagtaggctccatgaggatagggactgatgagtcttactcactgttgcatccccagtccctaggatagtacctggtttctaacaggtgctcaataaatatttgtggggtgaatgaatgaatctagaatggtctgtgcttttcccttgtacataatgggatgttctgtttgtctgtctccctgttgaaacatgagctctttaaatgctggagcctgtctccagtggatgtctgattccttctacatagaaggatctcatctttgttgaaattaacttgaggaaaaacagaaaggctagaatgtagatgcacaaattatgcaaatggaggtgacagtgaaaaccatggggattgttgtgactttcaagttgcagacatgatcagagggcttaggaactcttctaaggaatgctttagcttctgtatagaagcctgccaccatgagtgtctgtgagcctgatttttctctccagaaaacaagcattgccaaattgatgatggaaaactaaacatttcaagctttaaccttccaaactcaaagagttttacacaactgtttacttttatgataaaactgaagaagttaattttaaaatagtactagaaaatccatgtagcaccaaatatggccatgataaaaaacagaaataatttctaagtctgaaaagcaaggataatattaccccccaggcatattgccaggtttgttatggagtttctcatgttttgacctttccttttgcagctcattctaagctgataaatactttatgggctagtattcaagtacccaagaatacttcttcactatgaattacaaacaggctgggtgtggtggctcacacctgtaatcccagcattttaggaggctgaagcgggcagatcatttgaggtcaggagttcgagaccagcctagccaacatggtgaaacccccatctctactaaaaaatacaaaaattagccaagtgtggtggtgtgcacctgtaatcacagctgcttgggaggctgaggcaggagaatcacttggacccaggaggcggaggttgcagtgagccgaaattgcaccactgcactccagcctgggtgacagagtgagactccatctcaaaaaaaaaaaaattaataataataattaggagcaatgttttagttgctatttgcaatcagcttttaactatatctggtctaacttttccctgtttctcaaagcagtctgcctctattaaacacttatgtgtctttcattgaagtctttcctctaaagctctgtatgctggtttttcctgagcaatcctacttttttagttctcttcagaagcatcataccctatcagcatgtctttctgtaatattttcaaaccaacatccactcattgtctccccttaattattgtaactatactttgatttttctttggggaaccaccttcagttcacattgcttttattttctttttttctttttttggtggaggggacagggtcttgctctgtcacccaggctggagtgcagtggtgtgttcataactcactgcagccttaacctcctgagctcaagcaatcctcctgcctcagcctcttgagtaactgggaccacaggcatgcaccatcattcctggctaattaaaaaaagtttttttttgtagagatggagtttcaacacgttgccacatgcatgcaacttggttcaggtctctcagatcatcacactcctctggccacaattgctgtaaacatgggcatctggtcctgatcagagacaatgaattatggtgtgataaagcctatctggatacttctgggaaagggactttgttattccctcagctatgcacttgtgaggacatgcgcggctgtagtcatcttgtagtcacgagaagagaccttgcctcagagtggagccccacggcagacctttccttttgcagctcattctaagctcattctctctccatctaaaggtagagagagaggtatcggcacttggtaccattatttatgtcttgatcaaatcatgcctgaagttcctacttctggactttgcagtaatatgaagcaataaattcccattatattgaagccagttgggttgagtttctgttatttgcaaccaaagaagtcctaagtgataacactgcttaagcagtcaactttagtttttacagtgtaacccaacgtacgtaggacacaatcagctcatcacaggtgtgagaatgaatggtgagaaaatggaaactgaaagccaagatgtgcagttgaagaaaggaagagaaatttcagatagaaaccaaaggaagaaataggatcagtgaagacagtgattctcaaaccaggttgtacattggaatagcccaagggtttttcataacattccggtctgcatcccattcccacggatcgtgattacattggtctggagtgcagcctgggcatcaggaattttaaaagtgactgcaatgttcaggcaaagttgagaagctctgctctaggagatacttgtgtctgtttttaggaaaaaaataagaagccaggggaaaggtaacagctgaagaggcagtagaagggctaaggaagctcgattatgtaattacccaaatttgtgctgaaaaatactgcagtactgaaatattgagcaccacatcggtcactggtagaaaaagtaacgtgtatgccttgtgttttctgagagctatgccagtgagcttttatctttgagaattctatcattggacccagtcttaaaagaaactcatatcctagttagaatgatttgatcattctaccattttgcacactttttttctccttttatgcaatgaacaatcttgagtgatggattttaaaaataaaatgaggaaaatcatgatcattaggttgaagatttaataatagactctaaaaaagtcttcttgctttatttttaaattcagtgttagctttttttttaatcagtgtttttgtaagtcttaaattagtctcagaatgtgtttgaatttgtaagacaatatccacataagctgatttaaacacaagtgattgattttggggtatagaccataacaactcccttccctaaagctctaaggagacaaagattccttgttagaattaaagaagcaattatttttaaaataataaaataataaaagaatatattttctgtggaaaatatacaaaattttgattagtaaaaagaagaaaaataatcgacctaatctctagctcttgaaaaataccataatgtaatactatttttcacttgccttttctgattaataatagagaacatacttctaggttactttctattttgtaatgattttgctgttttaaaaatgttttaagtctttttgtatatggaagaaaattttattcatggaattgagagaaaagaacaaggacaaaagtaaaaatctcctataattccatcatacaaataaatcatttggaagtatagagagtctttttttaggattatttttattttcttctgtgaaacaggaattgtttgtacatcttttttagcatgctgtatctttaacttagcaatatattgtgaacatgtttccaggttaaaatattcttttttatcaaattttaaaattgaatgtgtattatagatgggccataattttatttacccaatatctgtcattaaacatttggttcttttcagtattttgccatttagtgtaatgttgtaaatgaacgtttatagttaagtaattgtgcccattcagtatgattccttgtatgcatcccaggggtgaaattgctgtatcagaggattcaaagtggaaattctttgactttgatgtgcaattgtagattaggcaaataagatggtgaagagattatcaacggtggagatcatcaaaggagaaatgacgtatttgtaacctctcaaattaagggcatttcctcagtatcatcaacttcttcccatccttggttaccacattgagcttacagaccccaaatcgataggctcctagcctcactaaattgctttcttttgcccaaatataccatgtatgtgtttagacctctgtgctactttattccacctctgagagatagctttttcactctttttcatccttttcatctttcaacactcatttcatgtattatctttcctgtgaagcccaggctaaagttagtcaatagctccattgtcttctcacagttcttggctctcagttagcagagctcttagaattccatactgtatatctattcatgtctgtctcttctagaaaacgtgaactatgtcttattttttcttgtctctgatgtgcccatcagtgattaggactttgctttcaattgtgatcttcagtctttattaactgcaacccacagtaagaaacaattttacatcatgatgtattatatgtgttcaacacacacacacacacacacacacacacacacacacaaaacaaaagtttcatggaataaaatttgccatgacaggatgtcatgcactcatattttctattctatttgtcattaaaaatgttctggtcacagttcaccaaatcagtttacctactaatgagtcatgattctcagtttgcaaaattctacttagcataagctcaagtactgtttgttgatctgaattgcaaaacattggcttattttgcagcaaatctcagacattatgtaattttatctatactcgatagtgttaaatgtattaacattgttatgcaatggatttttagagcttttcattttgcaaaactgaaactctatacacattaaccactacttccccttcccctcccctagcccttggcaactacttttctactttctggttctatgattttgactgctttaaatatttcatatcagtggaatcatgtagcatttgtccttttgtgactgggatttcatttagaataatgtccttgagtttcatccatgttgcagcatgtgactggatttccttcatatttaaggttgcataatattccattgtatgtatatagcacattttctttattcatctattgatggacatttgggttgcttccatttcttggctattgtgaatactgctgcagtgaacatgggtgtacaaatatcttttcaagatcctgttttgaattcttttgagtatatcaccagaagtgggattactggatcatatggtaattctgtttttaattttttgaggaacctctttactgttctccatgatgactacaccattttccatttccactcacaatgcacaagggtttcagtttctctgcaacatcgccaacacttatgttctgttcttttgacagtgaccatcctaatggatgtgaggtgatgtctcaaggtgattttgatttgcgttcctcttatgattaatgatgtggaacatgttttcctatgcttattggccatttctgtatctttggagaattgtctattcatgtcctcgatccatttttaaattgggttatttttgttgttttctccttgtttcttgatatatgctctgaattgaattattaaactgtgattcgagcatcttactttggcctgtgaaccattgtattctgtgacctctgggttagcttgcctggcagttttcttggaggtttctattgcatcacggtaattgcccacacgtcttcttcttcttttttttttttttaacttttagattcaagggtacatgtgcaggtttgtcatataggtacattgcatgtcatggaagtttggtgtacagattatttcatcacccaggtaatagcatagtacccaataggtagttatttgatcctctccctcctcccaccctccaccttcaagtaggccctagtgtctgttgttcccttctgtgtgtacacgtgtactcagtgtttagctctgacttgtaagtgtgaacatgcaggatttggttttctgttcctgcattagttcgcttaggatgatggcctccagcaccatctatgttgttgcaaaggacatgatcttgttctttttatggctatgtagtattccatgatgtatatgtactacgttgtctttatccagtctaccactgatgggcatttaggttgattccatgtctttgctgttgtccacacatctgagatgcaacctaattttaagatcatgcttgtaactttttttttttaaaaatacactaattctggactctgtcagttactggactaatttcctccccacacccacctctacttcccttctaaaacaatgctaattttgttcagatgtccatgccttccacattagctcagttgcctcaagggaagccaaccccactccagtttttcagtacaccctgattggtgtcaagaattcccattcagattccccttgccagtgactggcttgggggaatgaccacttggtaaatcctggctaatgagttgtggagggagatctactgggattggggttttctgggaaagtgttgcgaagagagactgcacagtaagaggaagtctcccttctttccctatatattgggccaggaagtgacacatgcagttgctacagccatcttgccaatagctccaggaagatgtagagggagggcggagtctacctcgctaatatagacatccctaagctactgaatctactaccccagagcccccattacctcttatctttatgatgttaaagttttttccttcttgaaaccagtttgtctaagttttcatttcttgcaaatgaaagcatctttcattgagtcacttgccaaaagttataatttaaatcactttaactggttcttcctttctttcttttttctttttttttttttgagatggaatcttgctctgtctcccaggctggagtgcagtggcacgatctcagcttactgcaacctctgcctcctgggttcaagcaattctcctgcctcagcctcctgagtagctgggactacaggcacatgtcaccatgcctggccaatttttttgtatttttagtagagatggggtttcactgtgttggctaggatggtctcaatctcttgacctcgtcatccaccctcctcggcctcccaaagtgctgggattacaggcatgagccactgcgcctggccttaactggttatttcttaatatgattatagactatcagcaatagaatcacattgggagcttcttaaaatacactttctgaggccccattgcaaatctattgaatcagaattttagtggggcactacattcctatacacacaaagacagcagaaataatagtgaaaacttgatgaaatgatttaaaaaattatccaaaacttgcaaataaagctgagaatgagtccatgtcctttcagtgtgagtgttgaaaaaattcacccaagattgattatatagaagaatgcacctgtgtttagctgcaatttgctatttggttagaaccagatactttaagttgtatgttaactatgttttctgtcttggagaaaaataactcctcttggtgatagtttagtgaccctatacaacattacccagttttgactctgttagcacatttatttctgcatccttttggccaacttacgatataaatcctcattcctcaatttctccttttaaccaaccttaccattatgtttgtttcttcattaattaatgaattaaataaaatttttgacatgtattcattgtatatttgtaggagagtcatgcttttttaaaattgaagattatactttaatgggattcttagttcctttgctcgtttttcccctcccaaggagctgtagcatggttccttcctcattaccaataatagctgcttatcttggtacctgcagataaaaggtaaggaaaggactaagttttcccttttgtaccagtggctatttgtgtgtttgtaaaacaagcatgactgaagttgcttttacctttggccactgttcttggcaattataagcagtgtctcaaatgcatttaggtgctgagctaattttctgttttattgatcaaatgatgtttctgttctctggaacacatttagagcactcaaggtaggtgtgacccagagttttaattagataccagttaaaatctaatttctagctgcttgtatgatcatttggggcaagtttctttgaggacagaatagcctagtggaagccgtcagccaagcagtcctgggtttgaatcccagcccgtgatcaccgcatgatgttgggcaggttcattaaagtcagttttctttcatgtgaagagggggcaatagcagatacttcacaatgtagttctttaggtgagagggaagaagttgaatggagcacctcagagcttacctctaagactaggtgctcaggctgaattcatattcggccacatagaggcttgtggttctgaatgagttacctaatatctttgagtatcattttccttacctgaaaagtaaataatagttcctgcctcataggcttacaaagaacatcaaaggagcatttgtcccattcgtcaacactaattgtttgagtaccactttcacgtattttgctatgtttctatctcatcttgtgcgctcatcacaaatcctgctacgttggcaccatttctactatcacttacttgatattttcgtttaataaatttcattagataaatatttattgacagtctattttctagaaactgttgaggtttcgagggtctagcagtttacaaatagggcaaaagttcctgccctcatacggttcatgtctcaagtaaatttgttttaaacagacactggatatcacctccattagttggaaaacaatgtcacatggaaaagatggtgacttgaatgaaaattgtgaaagctaaacaatgttggtttttacaaattctagctagacacagtctccctttctttgtttaaaaaatacatttttcacttttagagggtgtttgagacatactagtgccacactgcagccctccttgatgttattgggaaagtcaataaagaaccagaaagggggcaatttttctcactgtgggattcaatgttgttttattctatgggcccagctgactccaagttgactgcacttatcagcaggtatacaggacaggttccacactttggggccccacttggattcacataaagcagcacagtcccaggcacagagctcagagggagataacttttggctccagcaatattcatcataaaagagggcacattcttctttgcatctgcatggataggaaaggtctgggtatcctctgcatggttattaattacaaaatagatttcacatgtgttttcacgaggctgcgatttcacaattgcatcttagaatgtgccttcagagctctgagagctcctgggcgtcttgtctttgtatcatttggctcctcgtactaaaagccacatcctgttatgtttggttgctaggtggagaaatgttatcatgggcttcagcaataatttatccacaagctcaaggagttgtcatgttctcctgacagtgagctgcagcactttatcagctcgcctgtaaatcaggcgtgtgtgggtgcgaatgccagcactgtttgatctctcgcagacactgtaataatctgcttttgtctgattgattccttcacatcaccatgcacattgcaacagagagtgggtgccctctgtttatctcggctggtcatctgcaggaggccaacagggcagaaaatgctcttcgtgcggagatgtaagagtttttggaattggggcctttccatcatatccccgagctggtttcgttcaataaatcaatgatagctgaattgaatgcaccataaatacctcaaaccatatctcttacaagaatgtaagagtaattcatagaaacaggaaaggtaactttgtgagaaagaattacgacccctacaagccacagacattcagggctttttactgcctgtgttcacatctcacccgttgaactttgggggaaaaagaatacactgctggcgggtgtttgcttccagaacgtgcaccgggtaaaatggagtagaacagatcctgtcgagactgatcactgcttttcatctgacaccgagcttttctcaatttctgttggcttctgttacatgtggtccgacttcatccctggtgtcaagggatgcatcgcatcatcattatggagcaatttggactctgtcatttggtggtttatgagtcgcccttttgccacccccacaccaggcccacccttacgtgaggattgtcagcctttctgatgctttaaatgtcttcccatcaggcaagcctagtccctgtttcctgggctcctaattgctgacaggtagtttggggcacattttggcatctccagcccccaggagttgggctgaaatccgtgagctgattactgccttgagcatggcagcagcttgctgtgctgtgacccaggagccatccccagcgtccacgcctgccccagttgaaagcagaggtcaagctgtattgtagatgtgattgactaaaatcccatcggagaggaggattgtgttgtagcatccccctcttggatggcggcaagatgaaattacatgaagaagcctttcagctcagaaatgaatgtagctataaaaaaaaaaaaaataaagacagcttgagttgactgtttagtgcaatcaaaggcatgcaattgttcttattttcataatggtagtcaataatattaatgattatttattccactcctattgtgtgctcagacatatttcagtcacctgatagacattattagaaacagtctacattagtggttagagcacaagtaggcaaaccacagccagtgggccaaatccagccagccacctgtttttgtcagtaaagttttattagaacacatccacactcatttatttagatatcatctatgactgcttttccctacaacagcagaattgaatatttgtaacagagactgtgtggcctgcaaaggtgaaaatactatctggcgaccatttaaaaaaacatttgttgttgacacttgagttagaggattgctttggtgctagactgcctgttcaaaccctggctttaccacttaacagctgtgagacattgggcaagttacataacctctttaaaccttggttttctttcatgtaaaatggagattataataatgttggccaggcacggtggctcacgcctgtaatcctagcactttgggaggctgaggtgggcagattgcctgagctcagcagttcgagaccggcctgggcaacatggtgaaaccccgtctctactaaaatacaaaaaactagccgggcgttatggtatgcgcctgtaatccccgttactcaggaggctgagacaggagaatcacttgaacctgggtggtggaggttgcagtgagccgagattgcaccactgcactccagcctgggcgacagagcgagaccctcgtctccaaaataaataaataaataaataaataaataaataaataaataaaaataatgtttatctcattgagttgttgttggtgtaatgagcactgctatggtttgaatctgtctcccagaagttcatgcgttggaaacctaatccccaaatttatgttgatagtatttggaggcagggcctttggatggtaatcaggattagatgaggttatcagggtggggccccattgagaggactagtagctttataagaagaggaagagagacctgagttgacatactcttgccctcttgctgtgtgatgccctccaccatgttatgacacagtaagaagggcctcactagatgccagtgatgtgctcttacacttcccagcctccagaaacataagccatatagacttctattctttataaatcacccactctgtagtattctgttatagcaacagaaaatggactaagaaaatggacaaatatgttagccataactcaactggtaacaatattctctctgaacatcctgttatttgttctcttgtgcccactctgagcagatacatctgttcttcacctgccatttaggtgctgatgtcttgcatgttttgtgcctgtgcatttgcttgcatgaatttatgggagtggacatgtgcagcccagaacatttgagaaagatcagggcagagttacaggcttcataaaccatgatgcttttacaggtactttaaatatattcccaacgttatttgaagggtttattccaaagtctgcacaaaatcctcttagtctgactgttcaaattagaatgatagtgacctcagtggcgttacaggatgatttacaacatatttgagagtacatatttgctcttcacaattttaagagggcttagacctagttttaaaaaattgaaggttaagtcgcctatgtgaaaccttcaactcctgaaaactggattttgaaatccatgattttatactctatcataggagtcacaacatttttctgtatagggccagagagtatctgttttaggcttgcatctgttcagctctgccactgtagcacaaaacagccgtagataatatgcacacaagtggtttagtgttgctataatagaatatctgaagctgggtaatttataaagaaaagaggtttatttggcacacaattctggtgactggaagcttcaagattgggcaactgcatctgatgaagactcttactgcttccactcatggtggaaagaggaaggggagcaggtgtgtgcaaagagattacacggtaagagaagaaactagagacagagcaaggctctttttttttttttttttttttttgagacggagtcttgctctgtcgcccaggctagagtgcagtggcgcaatcttggctcactgtaagctccgcctcccgggttcacgccattctcctgcctcagcctcccaagtagctgggactacaggcacctgccaccatgcccagctaatttttttgtatttttagtagagaccgggtttcaccatgttagccaggatggtcttgatctcctgaccttgtgatccaccggtctcagcctcccacagtgctgggattacaggcatgagccaccgcactcggccaagccaggctctttttaacaacccgctcttggagaaactagtccattcctgtgagagcgagaactcactcacccctgtgggagggcattagtctattcatgtgagctccatggacataaccccaacacctctcactacttcccacctcccagcactgctgcattgggcatcaaatgtcatcatgagttttggtggagatcacaccacatctaaaccacagcaaatgagtgttcctataaaactttgcttacaaaacaggtgatgggttgttggcccaatcagccaatcttgctctaccacctctatctttaaaagctcatatttagtacttgtcctcagttccttatgggtattaatttattaatcctaacaaggatcttaggtggtagttgatagcttcatcattggcttttataggtgaaaagttgagggataaggaggttaaataatttgcccaagatccacagagcttcaactcagcctatctggtcccagagctagtacactgaggcaccattctatactgtctcctttagtcttagtgtacatagtgctattctttatatgaaaattgtccttgattttttttttttttttgagacaaagtctcgctctgtcacccaggctggagtgcagtggcgcgatcttggcacactgtaagctccgccttccgggttcacgccattctcctgcctcagcctcctgagtagctgggactacaggcgcccgccaccacgcctggctaattttttttgtatttttagtagagatggggttttactgtgttagccaggatggtctcgatctcctgatctcgcgatccacccacgtcggcctcccaaagtgttgggattgcaggcgtgagccactgtgccaggccaaaaattgtccttgcttttaaatttcgtttgtgtgtctgtaaggactcctttatggaagacagttttaaaacaatttctcccatccctagttgtgtttgtaaccaaaagagagaacactctatctttatggatactaatgggttggggtcactatttttcaatgaatgggtacttgagtccgccaaatccttgccactcaaaatgtggtcagcttttgtgggcttgcaaccagcgcagagtcctgcacttggaagtggctgcatgcttgaggtttaatgctctgtggttgccaccttgagatttgtaattctatgtttatttgtgttttgtaagtgacatccaaagggacattacttgtgcccggaacttggagcctcagctcacgttagttcctgccttctgctccctgtccactccctggatggcttcttggctccccacttcctgacactgtccagtgacggctgctgccctctgtcttgatggggcctcactccagtgaacttatctcatgagcatccctgtgtccaagaaagaacaacattacaaagcaaattagaaaacaccaaggcagatggagagagagaccacaaagaaacatttctaaaaattgctttttgaataaaggggccagcattttttagtctacactgagcctcacaaattatgtagtcggtcctggctgactctcaacagcagtattacctgggagcttgttaaaaatgcagaatctcaggctgcaccccagacctgctgaatcagaatctgcatttttttccaggatccccaggtgattcctgtgcacatacaattttgagaaacatagcccaaaagacggcttccaaatggaccagatgatcggatgcttaaaaggcatcccaggcaattctggggctcagccacttctgggatccatagtcccatatggatgtttcccagacttacctgatgatcagaaacctgaggcaagtttataacagcaggagctcccaggctgtctgctccaatctctgcatcagactctctgaaggagggtcctgggaatacatatttttaacaagcactccagatgacccttcttaggcagtaagtttggaaaactcaactctttataaatgacacacgaggacctagaggcatccccaaacatctaacttgtatccatatctgtcacttacctgtagaacccggcttaacctcacttgtaatttataagcattttaactagagctgcttcatctcaatcatctgtgtgtttgcaggtcacagtaaagagctatttcagtgcaatgaaaatggaacccagggtatttgggagttttgacatccaggcctagtatcgtaaagacaccaaggtaaagcaagacaaccaggcccctggaggttatgtctttgggcaactgctatcaatgttagagagactggggggaagagaaggagcaatgcttctatccgtcagtagttactctgtgtgcataggttgctctcaaagaccttggaccactgcgtggtggtggcccggaaggtcaacagtgtattaggtgacatcagggatgaaccgagaaatggtagggtctcaaccttgtacaaaacaacagagtatttggatctgggatgctgagtgctgtgtctgactgtactcccaggtagacataaaggggtggaaataagtccacaagaaatgggtcctttttgtgggaggtacaaagtatagtcatcaaccaaagtcagactaaagtagctggaacttttctgtcccatgcatagactgtgaaagagcaatatagccaagaaaccttatagaagcatggtttccaaatggaccatgctggttgcgaactcctgagggagggaggccagaggaaggcaagacgagctatgacctataccctctaaaggggatcagtgccagctcaagctagttatgcatatgtttatgtgtatacttatacatatatgcatgtaatatacacatatatgtaaatgtgttatacttttagtgtacaccattatggccataccattcacagcttttacctgctttgcttgaccaaggaccatgcagtgccagttgttaaaatttgtgtatacacatatagagaataattagctatgttactatatacttacatatgagtatatacattgtattacactatattatacaacattatattatttcatattgtacatatgtaaacatgtcctatgtcgttccaaatgtcagactatggccaaagggcttgaccaactctggaccacccaacaaaaaattccagttttttgttgagtaagcaataaatgtccttatggtttatacttgtgctattcaaagtgtggttcttggatcagctgcattgatattccctgggagcctgttagaaatgcacactcttaggctccacaccagacctgttgaatcagaatcaccgtcttaacaatcatcccaggtcatgcatgtgcacattaaaatatgagaagtggtctgggcgtggtggctcacacctttaatcccagcactttgggaggccgaggtgggcagatcatgaggtcaagagactgggaccgtcctggccaacatggtgaaaccctgtctctactaaaaatacaaaaaaattagctgggcatggtggcatgcacctgtagtcccagctccttgggaggctgaggcaggagaattgcttgaacccggaaggtggaggttgcagtgagccaagatcgcgccactgtactccagcctggcaacagagcaagactcagtctcaaaaaaaaaaaaaaaaagtgcttaagtagactaagccttgttcttttatttggggccttttctgatgctgttccttttccctgaaaacacttatctagcatgctttgctttgtgccggaatctagatgctgcaagttcactcccactgttgaagggtttgtctagtgggcctcttgacttgcaagtcagtgctttttcttttattcttaggtaagtattgcagctctttgtgttggttatctattactgtgtaacagattacccccgaaatgtagcagcttaaaataacacatatttattatctcatatttattatgggtcagggatctgggcgcctcttagttgggttgtctgcttcatggtctttcctgagactgcagtcaaggtgttagccagagatggggtctcttctgaaggctcagctgggaaggcccccttccaagctcagtcccatggcttttggcaggagtcagttcctcaagacttgtgacactaaggcctcatttcttcactgtctggctggttgctgtccagaagccaccttcagtttcttgctaggtgaacccctgcaacatggtagcttgttttataaaagtcagcaagggagagagtcagtcagcaaatggaagttacagctttttaaatcaaatcgcaacagtcagtcatgtctctttagtgctgtcatattctattggtagaagcgagttactgtatgagggggaatcacacaatgctgtgaataccaggaagcaggtatcattgaggccatcctagagtctgtctgccacacctctctgtgtctcagttttcttatttacaaaatggagaaataataaaacccactttataaagattgaattaaatgtgtggtttaaatgagatgatttctcctaaagccctttgaattgttcctggcctgtactgtgttcaaaaatgttagttgtgctgctcttgttatatttggcgtttttagtagcaccctgctgattactattattgttgttaatgacaataattacacagataaagagctcagtagatatatatgcaagatattatgccaaatattttacatgtgctttcaaatttaaccttaatgacaaccatgtgaggtgatggctaatttattaatttcacccttcctataattgactaaaccagtgttcataaacaacaaaaccagaagattgcccaagatcatactgcttataaatggctaagttaggattaaaatccgtattattggtctctagatttagactttttttaaccattatgtattagcttatgtttaatatggacattttctcactgtcttgtaagattttttttttgccattacttaggagtccttgacataggcaacaaggaatagaagtgtgatagtcctaccagttaatgactgacatgctaaactttaaggggaaagacattatataggtgctatggtttgaatgggtcccccaaaggtcatatgttagaaacttatttgttaatgcaacaatagtaagaggtggggcatttaaaaggtgattgagtaatgagggcacacctctcaaatatggattaatgccattatcaaaggagtgatttctagagaagttaatctcaagattaaatcttgagattaatgccattatttaacgagtgagttagttttcaaaagtgggttgttgtaaaagtgaggttggctcacttttgcaatatttttcacaagcactcacttgctcttctgcttttccaccacgttatgatgtagtatgaggctctcaccagaagctgctgccatgtccttgaacttcccagcctccagaaccatgagccaagtaaacctcttttctttacaaactacctagtctctggtattatattacagtaacagtatctttcccccatttttggggaaagataagtttctttcttaaataaatgtgaaaattcattatttgtttcttccccttacactgtgggatgctgttatggtctgaatatatgtgtcccccaaaatttatatgttggaacctatttacccaatgtgatagtattgagaggtagggactttagtaggtggttgggttatgagggtggaggcctcatgaatgggattagtgcccttgtaaaagaggcttgaaggagcctcctcagtctacccttctactatgtgaggatatagctagaaggtaccatctttgaaggagagagagccagtccttggcagacactgagtcttctggcaccttgatcttcccagcctccagaaatgtgagcaataaatttctgttgtttataaatcacccagtttaaggtattttgttatagcagccctcatggtttgagttaggcacctacaatgtaagaggcatccctaagcatcagtccttgagtataaagcattatccttgttcttcctcagtgtccagtcttatgactatgctgtccactacccgttgggctgcctgagatagagatatgtagttgtcctcaacatccatcattcccttgatcctttactaataaggcccgtaattgtatttggaaacatggtggcccagctgaagactgcatttttcagcctcttttgagctggagctgggcaacagaatgtgagaagaagtgataatcagatctttaaagggtgaaggcatttcctctagtcttctgtctttgagctgccctttcttcctctttatgtaatgtggctgggactgatttcatccttgctccaggggcctgcagcctggtcaatcagatcatcagcttcttcctggtcattgtgatgtgcccatatcacatccacccaggcctgaccaattgagtatcccatttctccctgtctcagtgactggttcaggggtatgtgtagatgaccccaaatctaggccagtggaacacaactttggaactttcatcacgatattggaaagagaaaagtggctaccttcctgctgagcctacagtggttggactatgtataacccaagaactgctgggtacaccatatggctagaatgtggctgagagggaaggtgatattgatgaaaacagaactacgagagggactgaaagagatctcacactattgtctgaggctcccccttcatccctgccaaagccccgtgtacactgggacttgtcatttttgtgagataataatttccatgcccttaaaagtaacttttaaaagcatttatttatttatttatttattttaagtaaaccagtttaaatggaagtgcagtcccttgaatctgaaaaaaaattgctttctgatatcataatagttcttacactttgtgattggggattgttgggaaaattaaatgagatgattcatgcgaaacccttagcacagtgccaagatagtgtctgattaatgctggctattctcgttcttactagtggaaagagaaaatgtagactcatgttatgttttgggcattgaaacttactttaaaagggtttatgatgactacatagatttgtagacctgccaccaccaattcatagaccagctacatcggtggacccctgtttttcagggcttttgctatgggggacatacagagaggcaagttacagacctaccctgaggctgttataggggaggcagggggaagccgtggctaacagcatggatcctggagccatataagctccagattctccttccgtcactcattagctgtatgacttaagtcagcaaatttcacctctaggcctctgtttcctcttctgtgagataaagatgatacctgtttgaagttaaagaggtgaatgtgtgtgttaatgagcccagtgtctggtactgagaaagttgtcaattaatggaagccatcacttcccataaaagtttttaaaatataatcgatcatattatattacctagtaatataaattcctaacttgcaaactgtcttgtaacaaaaatcttatctgtatgtttttcatttatctctagatcccagctcagtgcttggcatagaataaaatatgattaaagttttctgtatgaatcttttttctttatcaaatcctttttgactcaaggactacagattacgtcctgactgggtgccctgaatccagccctgccccctctttggcccgttcactgtgaattcatctgtgagcacttggtcactgagtgcccactaggggccaggcacatagacaagcggacaagatagtcaccagcagccgacaagacagtcaaggaatccatctttgtggggctcggagtctagtaaaaaagatggatgaacaaatgaatatgtattatagtagcaggaagggatgaggactctggagaaacatagaccaagatacaggatagaaagtggcagtggatgtttctttagatcaattcttcagagaagacttactggaagaggggacatttgagcagaaatctgaatgaaatgactgggtgaatgaaacaatgtggtctgctggaggtggggggtgggaaggcaaagcaaatgcaaagaccctggggttgaagcttgcttgccttgttcaaggaacggcgaggggccagtgtaactgagcttagtgagtgtggttggggagatgacgtcaaaaaggcaattcttaatattttagaaatgtgtttttaaaatcctgcatttaattttcacattagtaatcacatcacatcagtagtcacagctttctgtgacttccaattgctcttcaaataaagtcttgcatggatttaaaaaaattctttattgttaatttttaatttttgtgggcacatagagttgtatatatttatagggtacatgagatgtttggatacaggcatgcaatgtgaaataaacatgtcatggagaatgcggtatctatccatcctcccaagcatttatccattgagttgcaaacaatccgattatactatttattttaaaatgtacagttattattgactgtagtctgttgtgctatcaaatagtacatcttattaattctttctaactattttttgtgcccattaaccatctccacctcccccacagctccctacctcccttcccagcctctggtaaccatccttctactctatatgtccatgagttcaattgtattgacttttggatcccacagataagtgagaacatgtgatgtttgtctttctgtgcctggtttatgtaacttagtgatcttcagttccatccatgttgttgcagatgactggatctcattcttttttatggctgaatagtactccattgtgtatatggacggtattttctttatccacttactcgttgatggatgaacacgtaggttgcatggatttagaacctctgtgtagcctctaccagactcactttcttattggttcagcagtgctggttttgaaagttttgcagaaaagaacccatctccatgctgcttcggggccgtgtacatgctgttctgacattcttttcttttccttgaccatccaacacccactcctctgatatgtcctcagagagcctcccttgacccttgtcctgagatttggtcaggtttggttttgaaacattttcaagaattttgtttttcttccttgaggcacttttaaccactgcaaatagctaataaattgagcacttgatttaatgcctaccccttcggatagtttgtaagctttccaagatcagacttcctgtatagattatttagcagtgtcctggggtcttgggaaagttttaacaaatagcactcaagaagtggtcatttatggaatgaatggataggcattctgaggcaggacccttctctaccacctgcacctacctcactcacctgcacctacttgcacccaccttcactcacctgcacctacctgcacccaccctcactcaccagtacctacctgcacccaccctcactcacctgaacctacctgcaccccccctcactcaccagtatctacctgcacccaccttcactcacctgaacctacctgcacccaccttcactcaccagtatgtacctgcatccacccctgctcaccagtacctacctgcacccaccttcactcacctgtacctacctgcacccaccttcactcaccagtacctacccgtgtccacccttgctcaccagtacctacctgcacccaccttcactcacctgaacctacctgcacccaccctcattcaccagtacctacctgtgtccacccttgctcaccagtacctactgcacccaccttcactcacctgcacctacctgcacccaccttcactcacctgtgcctacctgcacctaccttcactcacctgtacctacctgtgcccaccttcactcacctatacctacctgcacccaccttcactcacctatacctacctgcacccaccttcactcacctgtgcctacctgcacctaccttcactcacctgtacctacccgcacccaccttcactcacctgtgcctacctgcgcccaccttcactcacctgtgcctacctgcgcccaccttcactcacttttacctacctgcacccaccttcactcacctgtgcctacccgcacccaccttcactcacctgtgcctacctgtgcccaccttcactcacctgtacctacctgcaccgaccttcactcacctgtgcctacctgtgcccaccttcactcacctgtgcctacctgcgcccaccttcactcacctgtgcctacctgcacttaccttcactcacctgcgcctacctgtgcctactttcactcacctgaacctacctgcacccaccttcactcacctgtacctacctgcacccaccttcactcacctgtgcctacctgcacccaccttcactcacctgtgcctacctgcgcccaccttcactcacctgtgcctacctgcactcacctgcacctacctgcgcctaccttcactcacctgaacctacctgcacccaccttcactcacctgtacctacctgcacccaccttcagtcacctgtgcctacctgcacccaccttcactcacctgtacctacctgcacccaccttcagtcacctgtgcctacctgcgcccaccttcactcacctgtgcctacctgcgctcaccttcactcacctgtgcctacctgcatccacctttactcgtctgcacatgcatatgcccataatatactgtcatagaaagtgagtgttatagacaagttgggggttaaaacatccagaggcaggagcagtgggccttgatggcctgtagggaggggtcaaaggaacatttgagaaaagtttctggaggtgatgtgcttggagatgatactgggaatcatcatcaacctgtactctgggacgtagatgaggatctcttggattaggggtgagatggagctaacgttttaaaaatattaagcttaggagaatctaaacagtgagaaaaaagagaaacttttttcctcaaaaatgcaactgcattgtatggagcagggagagagaagtcatgggccaactgaagcgacaatcaggaggatgcactgggggtgttgtcaccgtgttttctaacagattacaaagcctccttgctaaagaactgaccttttagtttatacctgagtgacacaggcagcagcatttcccataatgagaagatgaatggaaaaagtatgtctgaagcctttcctatcatgtttaatgagagatgagtttttctctacaatttcttaatgaaatgcttcaaacatgacttttaaattgaaaggaaaaccttatcattttgtgtactcctgcggctctgcatcccctgagctgggatgagtcaacagaaattgtaacacgacaaggaagaagtttccacgaggacgcctcctgcaggtttgtgcttactttccctgatgaaatgatggcgtctcctgtttcctcacgcttgcagtgttcacgttgtttccatcgccttgagagatgctccacactggttacatcactccttggctgtcatcatctgtccgtctttgggggaaatgacagagtgaggtttagaaagaaatatgtctgaaaggatcacatactaaatggtccaagaagaatatcagtatttttaaatgatccaaaatcatgggctattggaccttctggatatgtggtcactcttttcatataaaggggaaccatcagaagagtatccgatgcctaaaatatttgctttttcatgtgaaattatctaaagacaaattgaccaaacaaaacaaaacaaaacaaaaactctccctcttatctggatttcattaaaataaagtaagactaaaggtattttttacttttttgtctgcgtctgttctcaattaaccgcataaacacttcataaatcttgcatcagggtaatataacactgtacagtgcattttaactggaatattttgttttctgagtgctgtggaaggtggaaaccgctgagccctggctggggcagagcctgccaggccacattctggagtttctggagcatcgcaggtgaattctttgtcctgtgttggtgcagagaaggggtttcaaagtcacgtggagttacttccagctctgacttcttgcttttctaaattttcttggtcctgtgaaataaaaatgagctttcttaagattcattttttatttccctccagtgaaaatgtctcttatttcctctcattctcctcctcccttccccacataccaagacacttaattgagggtttaagcttgttggctaatagctaatcaatgttttctttgacttgggaatatggataatgtgtttatactatttgtaacctactttttcctaaagggaaatgaggtagtacacacacacaaaagcagcaagaaatgtaaaacaataaaaatggaaatttggggtcagggaaggtagaaattaaagtacaaaataaaaaatgaataacaaaataatccagtaagtatatcaccaagcttgactactatcaagcttcatagttttctctgagcttcctgctagccaagagaaaaggggatgaatggaacaactggttccataattctcattttctcaaagaaaatccaaagtatttctaatccttttgacgaagaatattttataaacctgaattttgagcagcacctcacacaggggcaaggggaatagctgaattaaacatcaaacagaatggtgattttcatgggatagtacttggtagcattgttcaagaaaatccaagcacgtgacattaaaacaactcagtgaggaggactccatgcagacattgtggtccaagaacaaggcatattggtagagggaataattaggagaatctgatatacagcatggttacatagggaaatgtcatattacttctacagagactgtcccttgtggtgactgacaaaagacataatgaaaaccgtctgtttagatggggaaaatgtaggtggagctactgcattctcacctgggaacactgagctcacatgtgactcatagggacacatctaacctcttgagtagattaatggcttagttgacagggactgcttaatttaagagtgatatcgtgggggttgcccaggcagagtactacatgtctggctgtgattgagactaggcctctcaggcagagcttttaatatgcctttgacagaatgttacaccttgtcatgcctcaatctttttaatcgttgctaatgatgataataaaaataatggcaatattcaaggcagaggcgaacaaagaaaaggcaatgactcgtagagtggattgaggtgttgtggaaagaaagcccaggctggaaatgtgggggctacttctggcattggcttaagcatggtatatacaggtgattcttttacgtctcccatttttctaatttgcaagagaggctattgtagtggttctccaactgtcagcttttggccagcagcattggtatcagcagggaacaaaataaaaaatgcaaattcctgggccccagacctactgagtcataaactctgggaatgtctctccgtgatttgtttcttgattacaggtatgagccaccgcacctggcctgagcagtttgtttcttaacaagcagtctcagtgattctgatgtatgctcaagtttaagaactattgggcctttgagttaagtctccttctatatgtgtgctagattgatataaaaatggccccaattctccatccctctttgtatctataccttttgcaagctactcctgttaggaggtagagatcttggatattcttgaatatttgaaatttgaattcttgaatattctcgaatattgaacattcttgaatatttactgctcttgcatcttgctttggccaatagaatgtggcagaagtgatggggtgctgtttcgaagctactcagttctcttgctctttgtttctgtttctgtctctcttgcgctcaatttttcagaaccttgtacagtcctgagaatgagcctggaccaacttgctagaagatgagaatgggtatgaaagagagctgagtccttcctacacaggacatcgtagaccagccacctccagccagcctgctagttgaccaaggtgcataggtcagctctgcctgatagaagttgggccttagtccagaggacatactaagccaatctacagacttgtaaactaaaacaaatggacattgctttaaaccactgagttctgtggttgtttgtgatatagaattattatggtaatagataactggtacatgatggaaatgctacaattctggaaatctaagtgtcctgaccttagatttgtgttaggaatctcaaaatcacataaagcaatgtaactttatttttctttaaccaaatgtgttttatcttctgagcccctattctattaggaggtgggaaattatttgtttgtttgtttttaagacaaagtcttgctctgtcacccaggctggagtgcagtggcacaatcacagctcactgtagtgtcaacctcctgggctcaagcattcttccaccttagcctcccaagtagctgagactacagatgcatgctaccatgcctggctaatttttaattttttttgtagagatgggtctcactatgatgctcaggctgttctcaaacttctgggctcaagtgatcctccttccttggcatcccaaagagctgggaatacaggcatgagccaccatgacctgccagaagttagttatttaatttccagttaattccagataatctagatcaatatgtttatgttatctttatgtaaattttcatcaataactcctgttcttctcttcctctgggtgcatgagaagatggcacttccttacctccttgaagttaggtatgacaatatgacagtttcccccaatgcaatgtgagcagaaatgagtcacttctgggtggaagcattgaagagtttgtatgcaattgtccgtgttctctcttcctttaccttcggttgtggaaggacatattgacagacaaatacctcaaaattgaagtagcctcagatgctgtgctgccacatgaatcacagattccccagagagttttctgggcctagagttggcttttcatgaacaagaataagccttcatttccagccattaaagtttgggactgtttgttaccacaccatagcctagcttatcctgactgatacaccaacttttctcagttaactaagggtctttcttccctgcttcaaattctttctcctaatgtattagtttgctagggctgccataatcaaatgccagagacagagggtttaaacaacagaaatttattttctcgtagttatggaggctagaagtccaagatcagggtgttaccagcttgatttcctctgaggcctctctccttggctggcagatggctgccttttccctgtgtcctcatatggtcttttgtctgtgcatgtaccacagcctggtttctctctgtatctccatatttctttttcttaactgctcaacatcactaatcataagggaaatgcaattcaaaaccataatgagatgatatctcacactagtctgaatggctattattaaaatgtcaaaaaataacagatactggtgaggttgtggagaaaagagaatgcttatacactgctggtgaaagtggaaattagtttagccactgtggaaagcattttggcagtttttcaaaaaactcaaagtagaattatcattcgacttagcaatctcattactgggtatatacctaaaggaatataacttgttctgccgtaaagacacacacatgtgtatgtttattgcagcactattcaccatagcaaagacatgaactcaacgtaaatacccatcaatggtagactggataaagaaaatgtgattatatatatacatatatatatatatatatatatacacacatatacatacacatacacaccatggaatactatgcagctataaaaaggaatgagatcatgtcctttgcagcaacatgggtagagctggaggctgtcatcctaagcacactaacacaggaacagaaaacaaaacaccacatgttctcacttataagagggagctaaacacggagtacatacgggcacaaagaagggaacaacagacactggggcctacttgagggtggaggatgggaggagggaggggatcaaaaaactgggtgaggaaacaatatgtacaccaaacacccgtgacatgcaaattacctatgtaacacatctacacacgtgtccctgaacctaaaataaaataaaatttaagaaaaaagaagaaatttccaaaaaactcccaaataatttctttttctaataagtctaatagtcaaattggattagggcccactctaagaatttcattttaatgtaatcatttttaaaagaccctatctctaaatatagtcactttctgagatactcggggctagggtttcaacatgtgaattttgggggaacacggttcagctcataacaccatggagaggcatgcatgttctaagggggtataggtaggactgctgtagggacaggaacagcagtgacttgaatgtccatcgtgtatactggcttccagtggagggcggtcctgaatattgccactgggtctctggctgcacagttcacatgtatggttcctgcattctgtatgtctcgacccagttcatctacctgctctcgtgcgtgttgcattatttccggccacacagagaaacagagaaaaaggccactctgggcacactggtctggacaagcctatgtgttgggaacttccccaggcccagttctataactaagaatgtgtccacaaacctcaccacctctttgagttccacccagggagcaagctccagcatcctttccttttgtattctttgaaattctctggggtttctatcactcccctctgtttgggggctattcagcatatgtatgtgtataagtcctgtgaatatgtctgtgtagatggggggcctaacattcagcgacccattcctgacattccagggacctacagttccaccagcatctaaatctatttgctttgcctcttcctctcccagtctcttattggatgggaaaaaatcttgctctaccttatcatatgttcatatatatatatatatatatatatatatatatatatatatatataaaacctcaaaattttgggctcaagcaatcttcctgcctcagcctcccaagtagctcggattacaggcacataccaccatgcccagcttatttgttgtattagtctgttttcacactgctataaagaaatgcctgagactgcgtaatttataaaggaaagaggtttaattgactcacagttcagcgtggctggggaggcctcaggaaacttgcaatcatggcggaaggggaagcaaacacgtccttcttcacatggcggcagcaaggagaagtgctgagcaagagtcggggaaagcaccttataaagccatcagatctcttgagaactcactcactatcatgagaacagcatgggggaaccgccctcatgatccagtcacctccctccctcaacaggtggggattacaatttgagaagagattggggtggggacacatagccaaaccatattatttatcttattttatttttgtagagatggaatcttgctatgttgcctaggctggtcccaaactcctggcctcaagcaatcctcccacctccgcctcccaaaatgctgggattatggcgtgagttactgcatctggccttgttatacattttaaaaatttttcttggatcttggctttgaaactcaaaagctgaaactttgacatttttgtccttcagctcctctgcaatacacctggctggggtaagatacaccaatctctagtctgaatgcagaagattcccaccatgaggtgggaataaattaccaggaattaaacacacctcacttatataaaaatacttccctcctccattagaatgcacacatttgcccattaggatttcttcttctgacaccaacaaagaagactataaattacatcttgacagaatttaattttcatggtgataactgaaaagctttggtttataaaccatattcagggtccagaaagagggggagagttacttggttttagccaaccattgtgaaaattaaagtagttcatctggatgcagagtttgaaataccatgttgaaatagagtattgcaatataagagcagcactgatatcacacaaatattatgaatgctcccaagcaaagtaaaaacattttgaatgcagaaatgaatttgtgattgatataaagaagaatgaatggagaatgatctatagcatttgtctgaaacctcataaaggcagtatctgaatactggttgttcctgatttcattagttgtgaatcactacatgaagaatgtgtgtccaagttaaacatgagggtcttggaattattttaaagaaaaaaatcaatttcactctctaggatggttttctccttctgatcactgggtcttatatgttgagattagtgtgtttaacacctgatttctcattttccccctgaatcttcattttccattgtcatttggcccacttctgtgttttttcacatcttcttaatgtctctcaatgttgcttttttttttttggttgttctttccaatcttttcttattttctttctcttcaaaaagggaatgaaggaaaagccaagcaaaatatattttaaaaataagggatgtgtgtaggcaaatactgagagatgtagaccaagcagagatgaataattatcaaagtttccaacaactctagctgtgtttctcaacaggaggtgactttgcctcctaggggacatttgaaaatatctcgtcacaacttatgggaggatcagcgcctgactccagaacaaagaataatccagcccaaaatgtcagaatttccaagattgagaaatcctgaatcacacatatggttttttttatcctctccaaattaaaaaaaaaaaaaaggaatgtattgccagcattttacatataaagcagaaaatctagattctttttttaattaatcaggcaagtgattaaaagccaccttctgagagagggcctgtactctgcagtgcatcacagcctctccttctagctgtataaggcaaattcaaggtccagaaagaagggggaagctacttggttttagccaaccactgtgaaaattaaagtagttcatttggatgcagtgtttgaaatatagtgctgacaatggagtattgcaatatacaaaactcacttcattaactcatattacttcctggcccttgtagcaaactgagtttgcaaccctctgcattctagggttggtacattatgaaccatgggccaaatctggcctgccacctctgtttataaataaagttttattggaacacagtcacactcacttattgcttttgtgggtgctttagtgctatgttgaatagttgcaaaatggactgtgtggcctgcaaagccaaaaatatttacactctggcactttacagaaacttttgctgattcttgccctaatctgttgactctattgattattagtgttagtctttgaactgaggcttcctgttggcataattgttagtatagacaagaaatgacagtgtgtttaatcacataaaccaatgtggatttcaattaggggagcccaggctcagtcaacatttttcatatattggtcattctaggaaaacataggattctcaattgaaacatgattagctttctgaatggaatacgggcaaggctaaaagttaacacagtcttactcttctcccctgttgtcagtgacacatttactcccattatgattggctcaacatatggccttgtattttgtccacaaaataccacctgctctgggctgtttgttagatcatctgcctcagaagaaatgagaaacgggaaatagatttcttgacctattcagtttattgcttaaccaccacataatacaaatgtttcaactaagctttgttcatttattcattggtttagttcaggggtcagctaacattttcagtaaagggccagatagtaaatatttttggctctgagggttggctaatctccattgcagctactcaaccctgtctgtgtagaaagagagcagttggaggcagtcaatcaaaccatggtagtggctgtgttgcaataaaactttatttacaaaaataggcagtgggctggatttggcccacagcccgtaatttctgactccaaatctggagatgccttagtcataattgggagtggaggtagcagagctaccgaataatggaaaatggcattttctgggtgatttctcattttccatcctcactttttatttgaaaatgcttcctcttctttccttcctccagtggctcaggggcctgctgttgagggaagagctggagtgagatgagcaggtgaattctattgtggattatgaagctagttcagtagaaagggagtgccacctagattggaggggagtgagacgaggaaacaccttccggttcctgaaacaggagaaggtaacatctcttgtaaggagaggaagactggtgcctgcttgcagctgaggagctgagtctgctcgagactccccaggtcccggaatcctcccatccttgcatccttctcttcatccatctccgcagacatctcaaatgtgtccattccccatgggatatgcatcctgggaagtgcccagtgatagctaactctaccaaggggatttgctttttgttagggactttcaaagtcttttctgtggtttattttcttctgactctaatacttatataggtttttcatcaaaatttggcaactaatgaaaatgtatgtttgagcatcacttattgagcatcacttttactcagaaatgtgcaaattattaaatatgagcatgtgtgtgtccatctacataacacacacacacacacacacacacacacacagaggcactcacccagtcacctaattttaaggactcctaacaaatctctgaggtacctagttttaagcaggtagaaattaagcagcttgcccaaagtggataccgtagtaagattttaaacacagccttgcctgattccaaaactcatattcagcttttttaggatactagtctatctttaagaagaaagaaaaaactatcggccgggtgcagtggctcacgcctgtaatcccagcactttgggaggccaaggagggtggatctcgaggtcaagagtttgagaccagcctggtcaacatggtgagacctgcgtctctactaaaattacaaaaatttgccaggcatggtggtgggtgcctgtaatcccagctactcgggaggttgaggaagagaatctcttgaacctgggaggcggaggttgcagtgagccgagaccacgacactgcactccagcctgggtgacaagagcaagactccatctcaaaaaaaaaaaaaaaaaaaaaaaaagagaaaaaacaatcacccatactgtccctcagacgaaaaagctgccaccttttgcggtgttttcctccagtgttttcatttttttcttctatttgttaaagcattttttagatcatgttgcaaatataattttattatcttgcttttttcactttattatttaagtatcattttaaaacctctttgtaagtatcctcttaatggtatactatttcttcatataggtatattgtaattcacttaaccaactcctctctgctgaacattgcggttattgctagtgttctcactgttttgaataaagaggcaatggatacctttgagtatgaaaaaactttccctcatgaaacttccataatctgaaaagctatccagaaacatggaaatgctattctttgagagaggcaggtgacataagtgaatcactcactttggacgaaaaatttaagggggcaccaaaaaaaatcttcgttattagcatataatagtataacattaaaacattaaattaatattaaaatctctaaatccatgaagaagaaaatatcaacgtcttagataaaggcagggtcagtattactgagtttttcctttagccttaggctccgagctggccatgcacagtgctgttactgactccattcaggccgtggggaggacataattggtgtctggaaggagaaactcagaactacctttattataatttattataattattgtgccctatgggaagctttcttctgaaaaggttcagtgtgatgggcccaaaaacagactctggcaaagactgcttggttttaaaccccaactatgccacttacgaactgtgggacctttgtcaaaataattccactctctggacctcactttcctgatgtactgcatggagatgatgataatcatttatccctcccagtggatgagaggacttagtgagtcccttagaacagcgtctggcttgtataaagactcagtaaatgttccctgttctactgctgcactgtgagcctgcccccgagctgaaggcagcctgcagacctgcttgctttactccatctggcattgttagatttttttttaaaaaaattagttgccaacattctaaaatcgctagatttcatgaaaaaatctgattttttttccccttatgaaaatcagaagacctggcaaacctggggctagctatgtcttccgtagtggtaacatttagtcaaatctgcaaaccagaagatggaagttatctccagtttaccctgaactagggttgccagagttagcaagtagaaaagatatgacatctggataaatttgaatgtcagacaatttttttttagcataagtatatcccatgcaatatttgggatatacttatactaaaagactgatttattgtttttctgaaattatgagacatatgctaaaaatcatttgtttatctgaaactcaaatgtcaccaagcatcctttatttctctaactcttccaaccctccctctccgcctatactttacagcttcattggcctgtgacttccacttaacctctgtagacatcagtatggaggaccttgggatcacatataaaaatcccagcagaggtcatcttccataagtagcactgtgtgtcatcactgcagtgcagttttaagctatttaataaacttccctcaagtctggcggcctttccatgataaaactgggggaaggaatccaatcacctaacaccatctcagcaccattgagtgagttccttgagcaaatgctcatgcgtggacgtgaagttagaagaaggcggagctttctacgttctctcgctgctgctttcagatagggaaccaggtctgagaacattcccgttgaagtagcatctcttagggccagggcatgaaggatggtgatgttttcctacctcacgttgagggacccagccaagcagggcaggtgcttttaagagccacccatgtccctgcttgatcaaagtgagaggtagataccattagcatggttgctctgtgtatagactgaagattatctttctggcttctatcagatggaaacacagatcttagcaggcagatcaggatcagctcaagcagcatctctccacttcggcactatggagtacttctttgtagtggggaccgtcctgtgcattgtagggtgttcaacagcatccctgacctccacctaccagatgccagtagcgaatcccctcagccctcatctccttgccatagttgtgtcaaccaaaatcatctccacacattgttagatgtttactgggaggcagactcactcccacttgagaaccactgtactagaaatatcaccaagagaatggagtaggccacacacgccttaatccatttatgccggaggttgcaaatttttttgtgtgtgaaaaatcagaccttggcgatgatcttgagcagtaagatataaataactcccacaagcttagcgttccaataatggaacactaggcatatgtaggttttaagggctgcagtaacttaattgtgtgagtcagttttaagttactggggtggcggtgtgtccccagagctgcagactggaggtctcaccaaaagtcctcaaatcccattcccaaagttgttggccaaataaaacttttctgtaggcagaatttgggctaagagaatccagtttgcaactcttgaaatggagacattcgcttagctgttctttggtttatggtgcaaatgatgatttgtttcactcctgtttgtgtgtaaccgaatgggaaggctcaaggtatctcttgctttgtgaacacctctctctctctctactcatttccactccccagccctgacaagtgctgcttctcacggtggggtgattttgcccctctctctaggggacacgtggcaatgtctggggacagttttggttgtcacaactgggggatgggagtgctattggcatctagtggtagacgccggcatgctgctaaacatcctacagtgcacaagacagttactgcaacaaaggattttccgaccccaaatattcccagggctgaagctgagaaacccagctacagcaggcaggaatgtgtggctcacctcagcacgctaagtgaggagcttttcctcagcactctgagcacctgggggttcaaagaacttgccttgggtctgtagctggggaagaatcagtctgtggactccagggagggacattttcttttcttttcgttttgcatttgtgcccagaaacagcaaggccagcagttttgtaaggatacagtttcttatgtaaactttcctttcttttgttgaaggtttggatattctacagaagttcacctgggcttcagattcgcacctgatcctaatctctgattaacaccatcagataaagagattctcctaacatgttggggccatagactaaggaagtttagcaagtctgggaggtgagaaatctaggggcagtgtggagagaaaaatagacccaactaaatttcaatatacaaccctacatcatctcagcattattttccaaacaccatttcccctctttatgcaattataaatgtggaccagcctttgataaccaataaagtagctgatgcaatattttcttatcccccttttgccttctgttccctttgaaatattatttggttctattttttttttctcctggtaccctctgtctctcttcgttttttttgtgtgtgcatgtgaccacaattgtagtttcagtaaataaaacggccgcttgataacgtggaacggcccagcgcttaactctgcctttagagatcctttacatcaaaccagcaatcaaaaagtggtgcagataaaatttgtcatcagggatttcctacaaaagaattacagtggagaaatggcctgatcaatactatggattttcactgcaggggctggtggtccaattgctgtgagacactcacacagataaaagggcactgctgccgctccgtcacagactgctgactcagcacaaagcttggcaggtatttataggccagagtgatacagaattatcaccttgcagtgcccggctcttgttccttccaagattgccttcctttatgggattgctaaatgcaggtgaatggaaaaatgatggctaacagctgtcaaaatgcaacagaatgaagtacttaaatctttttttatccattaaaagggtaacaaccatacatatatcacggcacagacattgtaatgatatttgggggctggtaaacgagggagtaataaacaatatatgttctgatcagaacgactgaggaaatagtcttggagggaaggtaggtcttccctgagccttataattactttaatggttgaacatccctctcacggaagaaaaacaaaattgtttttgtatcccaatctttggaagacccactttccccttatgctggcatttagaaggcctagaactattccctatggcacttaaccatgcttactgcatcctgaaatttctgaagtttattcatgtcagcttaattaaagcatgtgcaatgatgataactgatttgtaagattctccaggtgtaaggtctgggatgcagtgagaactttctcttgggttgtttttaacctctgcgttccagttgaatttcagatgtgccatagacagagcttcttcggaggtggaggagaaggcacattactgctctcccacgaggtggggtcattctggggaagttctcaaagctcatcatctcagctctggggctccttagccatgacttacatagatgaagttagtacagttgtcctgattcccaattaatgcttcctcaaggaacccccctggaaaaatcttaccaatccttctagacccacccatcaatatttgtcttatttttcatttagtgagaatcagctcccagaaagattcaaaatagcacttatggtggccttgtagaatcttggcttgtttgagagtaggctgtgtgtgtgtgtgtgtgtgtgtgtgtgtgtgtatgtgtatgtatgtgtgtgtgtttgttttgtcttctcctttccctaatgcattttatttaaaattttcaatgaaccatttttttgatgaacttgaacattaaaagaaaaatgttttcctcattttcttcaatatttaaaaagtactgcaaagcacaagggaaatgaaccaaatatatagaatatcatcaataacaaggcatctggacattaattaattcttcattttggaacacctgtggcgagatgggccttgtgtaggatgtcgcagaaacacagggagtataacaggctttcaaggaaaaagagcttatggaaaggaggacaaggaaaatatttattgaatggattctttgtgccagatgcttggcatatgttataatgaaatagcaaacagccataaaatgctaagcagattcccaagtgcttcattgactcatgggatcctcataagaactctatgaagcagtgttattaccgtccccactttacagattaggaaattgaggcaacagaaggttgattaatttgccaagatcacttggcttggaatagaggagaggggacagccaggtgaccttgaaactccttggtgattcaagaatcccagctcctaactgcagagctacatagcttttcattttggaagctctctcatctcacccttaaaatagtgacatgaagtgggcagtcctgttgaaccaataagaaaagcttagaaaagttgcacatcttccccagccaggtaggcaaagagctgggatttgaacccaggtgtggctgtctccaaattttctgctacttttactgtatcatttacagtgaacctaccaagcaaacaagattctgcagcttctaaattcagaaaacaaaatgcaggaagtgcaagccataatgtgcaatctagggaaaagaatttaatttcaggaagcatgccactgcttggaaggaacattaacaagacttttgtatccaaatcgtccctggccagttttgggtaggactcaaaaatgtaacccacaccttctggaactgtccatggggaaatcatctttgtgcttgtttgaactgccttatcctggtagaaatcattgctactatcatcacagcattgttgtatggaagtttactgtcactggcaataaacatagatgaaaggaggggggaataagaaaacaaaagggaaaaatagaagcaaaaaatgcaccagagtgaaaaaaatatccataaactcgttgttttttgtctctcttgttgctctgatgtgcacaaaggaaatagacggaataaaatcacatctcaggaacaccaacataaattcccccttgctttgacaagtacgtaattttcttcagagatgctcttcacgtctggagagttatgaggcaatttcattcccatctgacaaatttacaaagaaacattagagagaagggattaggaaagcgagaaatctttatagactttttcctcaggctgtatttcccttccatctcttggctcttccttgaggaccaggcatgaatgcctcacacagtgtgggcctcataaccaagacacttaggagagaaacaaaacatgaaatgtgctttcaatcaactaattgtatttacattattgggggatgggggtggcacttggggaccagaagattcttattggcaaacatggaagtgaagtctctgaggtatggattcaaaatggtatttgtaaaattggactttgaaagaaatgcagaaagagaaagaggggagggagagagaaagaaagggagggagagagaactgaatgtctaagaaagtttgtggtgcaaataagcatttcaggatgatcacaatacaggattaataatagcaaagcatatgtatttttttccttgtaggattatagatgctaaggcaacttggagtttttctccttttaaaacatctctgttgctaatttcattgtgcagctttcagagtgactaaccataccagtttgaccaagactgtattggctgcagcacttaaaagctcacatcccggaaatcctttggtcctcggtgaattgggatggttggttaccctattactgatgattgtaattctcaggtaagttacttgagttttggcagctgttaactttcctaaatatttgcaaccttgaattattcacgtttggtctctgttaactggcaaagtgaatgtgtacacacacatactacacatatacataaacttgtagtttgatcatttggggattctagtaaagtcttcaattaaggtcactgtgagggcttagaattctgaaggaaaaatcataataagtgctcagaagttcaggaaacgttattttttttcctggagttgagattaaacataatataatgcagatgctgtcggatacggaacccaaatgacaaatgttttataactgggacttagggaatggagaaaagtaagagatacatagcttccaagaccttagttgagagccgcaaagcacccataatactgtatgtataatttggcaggagaaaggtgagatatttgtgcgtgtattactattgtgtattttttagagtacagctgggcagccatgtttgtgatttactggccatatcaaaagactgaaattgaacctaatctgtataatttcagctttctgttctttaagttttttcacttgtagtcacaatttaagtcatttgcattttctaaaaattctatttttggtgatacttgttattttccttctttaaagttacaagaaaatctttattgtttaccttcctgtgaaatggtgatttatattggaatgggatgtccaaaacctttaggacagaagagaaaccaagcatttattttgccaaaaaaatccccagagatcttgcattttggggtttaagtttaacatcctaaaaccaaatgttgaagttgaatttggatgcgatctctcttgaaactctcacagtcaaactctccctttaatccgtctgctgaatatgaaaaacggggcttctttgaactgtaaatgcttctttttgcctaatttagagaaataaacaatgataagtgatgttcatctatagagagacttggtccagaggcatatgaaagttgtgagttgtctgtactggctaccctctgtaaaacctgccctgtactttatagaggacagtctatcccagtatcaccgataggatgtacagatggctttttgcttacaagcaagcataagtacagtgttgccgagaaattagattgagcatgatgagagatataaaagtttaaaatatccccggtggaaaaatttttttctttttattctgcatttgaatcttttaaatactgtaacttttgggggaaagttattgagacataaaaggaatatttgaactgctttggagtttatgataaccactgtataatacattatcttgaaagcctttatagtacacagttacaaacttccaggaaatctattaaaaggcagcattaattaacataaactttttatagtgttactaatattctgcaaacaactaagagtttaaaagccctttttacaggcatttcttgctgcctatacactatgatcagcatgaattacaggaaacactaaaggagtagaaagaaatgaattttcattgcttgttctagatgggaaattcacctcaatatctgtctttaatttgaacaagtgtgaagacaaggtactcaccagtttgattagcatcctctttgtagacttgtacagctgaccgaaagcaaaacactgatgcttcaatattcattctcccaacggatgataaatagcatctttgaaatgactttagaaaacaaaaggatttccttgaatcctgggagatagagtttggctgtatccgctcacaaaacttttacgatctcatcagtgggttagtccatgatacaggctacatttagacacttacagatgtgtcaagtggttccagaaatgaaagtagtattttaatttttttttgatgtctggttcccagttgcactggcaaatctctgaaacctgaatcttgaccttttttagagtgatgtttttcatttctgttttgaattccaaaggggaggaggcctttcagtctctgtgcccaaagggcaaaactgtctccatttaggattgaaatgaagatgacctgggcctgagttatctagtcataattatttcctgactctctgtatttaaatatttctgctctaacgtgaattaagcaaggtttctttgcttcctctttgcagtgcagtctgctgtttgtaaatactagaatggtgattctggccaaagattcctcgctttcttaggtctttggtgtcatctgggtgcgactgatgattttctattttagtaaatactttacactcttactttattttattttatttttttaaataaaatgctttccagatcccttggaggcagagtcctccaacattttgttgccattctgctgttccctcttcccacaacatcacctgattctcaacccatatggtactaggatttcactgtgataatcataaaacagattattatgcatatacattatttgctgcgtacattttctccattaagttttttgtttattcaagagatatttacttgaggagctcagtattggccctcccattttatcccttttctctatttatattgtcatctatacctcttatctttgcttagtgggtattgtgtgccaggtattgcagaagtgttggtgaacatgacatatgagcttgctccttctggagtttgtcttctagttagggtagctatgcagagggcaagcaagcaaatgactaataaggtgataagtctatggaggaaagaaactgatgatgtgttggggtgtgactgatggagagttgaggcagcatggctgggatgtcatctgtaaggaggtctcatcatagcgggaatttgagtgatgagaagaaacccatgatacagagatctggggatgagtattccaggcagatggagcagtgagtgcaaaggccaggtggaagcgagcttggtgtgggcagaccaacgtgggctggtggagcaggatgaacaaggatgtcagagagttgggaaataagcagtgtctctaataacatctaccccgtatcagtgtgagccctgaaaagacattacctctataccttgaagaagccttgaagggaggtgattgttttcacatttagcagatgattaaatagaagttcggagaggtgttgtggtttgtccaaggtcacacagccaataaatgtcagagctagaattcaaatgtagatttgcctgattccaatatttgtccgttaaatatattttgagtacctataatgtgcctggcccttggtaggaggtgaggataaggtagtgggcaaaataaaatttatattctcatgaggcttacttccagtagaaggaaccaggaaagaactaactgtatagtttatcaggtcgtgagaagtactatggagagagacaaatgagggaaaagaaggcaggaggggagatagtggggatggggctgctcttttgcacaagaatttcagaaaagatatcattgataaggagatatttgagccaagaaatgaaggaaatgaaaacaagccaacaggtttcccttgcagagcagtccagatataacaagtagcaaatgaaaactttcaaagtgggcataagtatggcgtgatggagaaacagcaaggatatcagttagctggattcaggtgaacaagggagagaatatgagactgggtgggctgtggcgaggtcttcggcttttactctgagtgagatgagagtcaatggaagaaaagagggccatattgtaagtttggttttattaccattattctggatgctggttaaaaggtagactgttggggaagagtggaagcaggaagttgggaggccagtggtgattcggtgattcaggcagacatcatggtggctggtgtcagagtcctggcagtgaagttggtgagaaggggccagatatatgatatatttcaacagtcgagtcaacagaattcgcttgtcgatttgggtgtgaggtgtgagagaaagaaaagtcaaggatgacgtagtgtttatggcctgaaccacaagcaggacggagttaccatttaccgaatggcaaaatcagtggaggtgcgctattttcaggggaaaaataaggagctcagtattggctttcccaatgtgtccctttttcaatttatattggcaactatacctcttatttttgctaagtgggtcgctgatgtgcagatgttatttgaacagaaaattgtcaacatttttcttccttaacaaaacaatggttgtcagtacactgtgctagtgcattaattagctttgctgcataacaaacgaccctcgaatttcagtggcttacaataacaaacattcattttcacgaaaccaaaaatacaggatggttatgactcagctcaactctgccccagtgcttccccctctgccgacttctgcctgtacatatcagcttacattccgttggccaaagcacatggctgagtccaaccatgataagggaggaactacacacccccctcaaatggcatgacatttccttcattcaagcctggttgtcatctcaatcagttaaaaacaaataagtagatccagaatgaccatgcaacagcctccaaagaagatgagaggcctcagccccccaaatccagtgagaactagttcttcccatgtctcccagcactcaagcatctctatactggagcagcttctacttggcagtaagcctatctctttggtaatttatttctcccatgatgaccttgagcccactcatagctggcctgtgtctttattcactattacatcatcagtgcctactgcagtcctacacacagtagttctagtttcgtgtgattggttcagatgcattgtacctagcttgtagaattcatttagaggctggtttcttttaaaaggaataaatagaggaatggagaaaagacaagaaagtggagagttagcaaattcagttgccttagcaaattcagaagccaggcagataacacacatagtgcctccacagggtttgagacaaatgggggtggtggcccatttagccaagccagagtacatacccccacatggtagaattaaagatattttaggcctgggcacggtggctcatgcttgtaatcccagcactttgggaagctgaggatagtggatcacgtgaggccaggagttcgagaccagcctggccaacaaggtgaaaccctgtctctactaaaaataaaaaaattagccaggtatggtggcacatgcttataattccagctacttgggaggctgaggcaggaggatcactggaactcgggaggcagaggttacagtggtcaaagatcatgccactgcactgcagcctgggtaacagagtgagaccccatctcaaaaaagaaaaaacaagttagaagccaaataaaacaaaactacctgtgctagtcaaataaaactgtttgaagggcagattctccctgaaacctgtcagtttgagaatctagtaatagagttgggaagatttgggcttatcaaaggaaaacttttgtttttgttttgttttgcttcctcctctcaacctccataactattgggtactaggcttagtgcctgggtgaagaaataatctgtacatcaaacctcagtgacacgagttaagctatataacaaacctgcaaatgtaaccctgaacctaaaataaaagttaaaaaaaaaaagagaacctatttgtagggtggcaaatatctttccctcaccctccatcattaggtagttctttggtaaaaaaaaaaaaaaaaaaaaaaagaatctttttatctgaaactgggacaagaactagctagagggaatacctttatttcttttgccaaagataactctggagattttgtttttagttctcttccatcttcctgaaccttgcatactgtttgggtggtggaggggtgttagggggtggaggagaaggagaagaaggaggaatgcttaggtgaagccctgagagtttctgcctctcatgcctgaggtgtggaggtagagctctctggaatatttccaagccaagttgcggaagcccacacttctcccgcctggagggttgttctttgacttcatcgagggcatccaaggccagggttatgaaatctgatgctcagcagaggattcctgaatcttctcccaccacaatgtttaggaactggggtcaactaggacataggtcaacattagtggtgcccaggaaattcgacctgcagatatattttgtttggcttacacagcaattataaagttatatgtattaaaaaaattaattctctatgggccagtatttacaaaccatgagattttacatgaaaatcaatatttctgccttcctctgaaatgtggaagctctgtcaatatggggccgcatctggttgagtaacatctgcccacttcattaagagcatgccggctagctcacacccgtccctacccagctcactccactcaattatttcacctggatggccctgttagacaattgggagtagactcttgacctatatatttatgtataatacctgtggctataaatacattgctgtaaatgcctcagatatcatctttaatttaaagagcagcctgccctttaggtaatcaacttcggctttttaaaaccagaattgttaattatcctggcagtattgtctttgccctcaacctgataaagtcactggtgaaaggatgcgattatttggtaggtgaatctaaaggatatcatttctcttttttccttcttctgctattttctctttactcacatcttccttgccaaccaatccgacatgcaagaaacccttcaggtgcttaaaggagttggaaaatattcccggaaatgctgaaagtttgccacattgtcagaggataaaagcacagtgttcaatccaaaggctttgtgtaggtttttttttttttttcaatgcaagttccaggttaaatttgaggatgcttgtgttctctacattttaatgagaagctttagctaagaatttttttttaaacaaaggcacaaaagtttaaatcctttgcgcaatagcagtgagattgaagtgacatactgttttaactttttgaaaaacagcaatgctcaaataatcagcaggagagggaatattagacaagtaaatatggaatattatgctcacaagcaataactgtgtctattaaatatgcaaaccatgcagcctcatatggatttttttcattacatcattttataggtatatgtgtgtataagactgggtatatagtaaacttttatgagttaaatcattttttccattagcttttgttgtaattaccaagatgcttactgtaatttctgattgatcttcaattggcactaccccataacactttatcttgaaaattctctgcctgtaggcctcttagttaggtagtgaacgatttatctatacaccttcaacataatcaagaggtcaatatgtaaagggacccatttgtaaatgaaataaagcaaataatatggtggttatttttgtatttagatagattagcaacattgattctaatgagagggaccttcctttctttatagcaattgtaccatgcagtgttagttatgtgctgatttctcagtttatttcatgactaccttcccactagaatgtaatttctctgaggacaggaatcatgcctttgttttctgtctttaaaaaaattgttttaaagtgcggcaaaatatccagaacataaaatgtaccactttaatactttttgagtgtatgcttcagtggcattaagtatattcacgtttttatgctgttatcatcactatatcttcagacttttcatcttcccaaatgaaaactccataatcactaaacagtaattttgccttcccctccccccccactggctgacaaccatcattcaattctctgtctctccaaatttgactatgctagatgtcttgtataggtggaatcatacactatttgtctttcagtgtctggcttatttcacttagcataatctcctcaagattcatccatgctgtagcatgtgtcaaaaacctgcctttatttttatttttttaatatttatttatttatttttgaaatagaatctcatgctgtcgcccaggccagagtgcaatggcacaatcttggctcactgcaacctctgcctcccagagttaagcgattcttttgccttagccacccgaatagctgggattacaggcatgcaccaccatgcccagctaatttttgtatttttagtacagacgaggtttcaacatgttggccaggctggtctcgaacttctgacctcagatgatccacccgcctcggcctcccaaagtgctgggattgcaggcatgaaccactgtgcctggccacatgactttattttttataaccatgtgcctggtgtctagcttagcacttggatgtagtaggaattaggagaccacaatatatctttgttgaaggaatacatgaaagaatgactcagtcagccacattgtattccccttcgtagccttgggatcaggatgcagtaggtcctctgtaattctttggggaagaaaagaattatttggcttcctgatttctgaagcagagcccagggggcagttgagatacttttggaacatgaaaaactcgccatttccccttgcccgtgatgtttgaatccagtgtatgaaaaggaaatctgtggcatcttttctcgagcttgtaatttgggttgctttgtgttcactgctaattaaccagttggtgatgtgctgtttgtcttttcgtctgcctctgagcttgtaaggagtcagtgacaagcccagtgaaactgaggggcactcagataattaaggtttggagggcttcttaccaacccattgatgaaccaattgcttcctctgcctcaattgatgggtagctgacacatgacgttaacagtggctttctctcatatacacagcagcaggagactttcccaccttttaatggctgagcaaacttcatcccaggcaaccctggcaaaatgaaagtgtattgtcaaagttacttgtgaagatgactgtgtttagactagaagaaaagtcttgatacatcagaattgccacacacgcgtgctcacacagtctttattattaacatctaaatgcaaaaagtaatacaaagctttatttaaacatttaaatgtataaggagaaatgactttgtgttctatattgttcttttgtgtgtgtgtatgcctgtttttatcctttaagaaacaacagtgatagagtattgagtagtttcttttctttttttcttttttgagacaaggccttgctaaccctggctggtttgcattggcgtgatcactactcattgcagtctcaacctctcaggctcaagtgatcctcttgccttagcctctcaagtagctaggactacaggtgtgcaccaccacacccagctaagtttttattttttgtagcaatggggtctggctatgtttcccaggctggtctcaaactcctggactcaagcaatccaccagtcaagcctcttggagcgttggagttataggcttgagccaccttgcccagttgagaagtttctctaaatctgataacctcctcctgtatagagtctgtgtctgttatgcaaaaacatcaaataattgaatgtcatgtgtgggcggctctacacctccttacctgtgcttatcttctgcttctttgcctctttttaatccagcgtagtttggaaccagcagcagcagcagctccccagacctactgaatcagaatctacattttgataagagcccagggtgactccatgtacgtgaaaaagtttgagaagtccttagacctacagttcacagcttctccttctttcttattcaactgaattgcagtgggacctgagtatggttaaaataaatgaataaaaacacaaatcaattcttgggtgagtctcatgaacaatcaagattaagaaccactgaccttactccagtaaatgccttgagaaccctgagggcagggacgctgtctactgtgttctttcctaggaaggtgcttggaatatagtaaaaaaaaaaattatttattgaatgtattattatacaaaacccaaggctcagatgaccttggggcagtgtctttttccatgttcagaccctgaaggagatcaacctgcctgtctgctgaccctgctcccgtagctgggcaacaagttctttgaaggtagatctaggtggcccatcttggtgtccaccacaagtggttaacagtcaaatagaatcatgttttaggaggcaggctctagaatttgactgcctacctttcatttctggacctgccactccctggctgagtgactttggccagttatttatcttcttcctgggtgatatggtttggctctgtgtccccacccaaatttcatctccaattgtaatccccatgtgtggagtggggggacctgtaatccccacgtgttgagggagggaggtgattagatcacggggaggttcccccatgctgttcttgtgatagtgagtgagttctcatgagatctgatgggtttatgaggcagttttccctgctcttgctcactctctctcttgcctgctgccatgtaagatgcgcctgcttctctttctgccttgattgtaagttccctgaggcctccccagccctgtggaactgtgagtcaattaaacctctttcctttatacattactcagtcttgggtatatctttacagcagtgtgaaaacggactaatacactgggtcagtctccttatccataacatactatcaattatacccacctgataaagtgatttgagactatagtgagaaaaatagatttaaggcacatattgggcacttaattaaggttagttgttatcgttcctattataatgatattttacataatatataattaaaagtttataatattaaatcatgttataaaaatagattcttcttttgcttgtgtgaagaaacaaactgggatgataaaatgttagagaaagggcagttttatccatactaaagataatagagatattattttcctcttctgtgtgtgagaaccatctttgtctccttacacactagacaggatacatttgtttgtggtctgtgtgcatttttccttcttgtcagagcagcaagaactttgattcttgcctttaaatgggatctttcgggagatgatatgatgataagatttgtaatttgccccgtctctatccttgcgggatcttgggttctgctccagctacgtcagctccgtttaactcaatgatctggtgacatctttcagatctcagaagggctcaacaaatgccaccacggagttcagtagtgaagacacaatgccaagattaagcaaggttgggttacatttgtaaatgtaaaggctcaaagctttgtttgaacaaatcagtgcaatagatcttaggtagaacagagttctagcagaactgtgaagtttctaaaaaaaaaaacaacagaaaacccacaccagtgagtgttaaagtctcataggaataattccattgtggctaagtgcggtggctcacacctgtaatcccaacactttgggaggctgaggtggatgaatcatttgaggtcaggagttcaagaccagcctggccaacatggtgaaaccctgtctcttctaaaaatataaaaattagctgggtgtggtggtgcatgcctgtaatcccagctactcgggaggctgaggcaggagaattgcttgaacctgggagtcggaggttgcagtgagctgagatcgcaccactgcactccagcctggggacagagcgagattctgcctcaaaaaacaaacaaacaaaaaaactaaaacaaacaaacaacaacaaaaaaccccaattccattgtgtggtgatgataatcatcatcattggctcttttttcccatctcccttgtgataataaagctcaaactctgtataagctaggattatggtatgctgtgcacaaacccccaaaacggtgacttaaaaacaatataattttattttagtctcacagaaataaaggtccaactgatttggcagctctgctctgaaactctgttaggaatcctggatgctgctatctcatttctttctatccctatgatgttgcctttgccttcatgacccgggattgctgccattgtggtttgcattccagccagcgggaagggagaaagaggtcagaactctcttccttttaagggcaaaatatacaagttgtacatgatcacttttattcacacatcttttagtcatgcagtcccacccaactgcaagcaagactgggaaatctggattttttgtggccatgtgttctgctagaaactcaattactctatactctctcagaataggtgtttgatacagagctcttcccacctccagctcccaggtgggcacgtgaaccagacttggcacctcaatgcaccacatctccgtggcaactgagataggtttccagttgcccatgcaacccaagctggaacaaagagactgggtcctgggttcttgctatgactagcggtgaagagattgctcttccttctggggttccttcacaggatgaatgtaatcctggagttgctcctggtttttttgcctcctaatggaaaagtgaatgtaacacagaggaaagtagaggagagactgagagaaagggattcctgatgacacagttagagcacttggattctgttgtacctgaaaccaggcttccccagataaataagccaatctacttctttttcttttttctttttagttaggcttgcttggacttatgttcttgccatttattataaaaaagcactctgaataataatgtacctgtgttagttcattttgcattgcaataaaggaatacccaaagctgggtaatttttaaagaaaagatgttgatttggctcacaattctgcagactgtacaagacgcttggatcctgcatctgcttcttgtgaggtctcaggaagcttttactcatggtgaaaggcagatgggagctggcatgtcacatggtgagagagggagcaaaagagagaagagggaggccacaggctctttttaacaaccagatctcatgtgaactcattactatgttatatacttctgtatataataatatcgatatattatacatactatatgtataatatatttgatatatgtatgatatatccacctctggcagaatttacccacatgcctacttctatgtatactaaaactaatattatatagaagtatataatatatagtattatatatagaagtatactttattatctatatcatatatagaagtatatgatatactactatatatactacaacactattatagaaatatagtctatatatggtgtatatgatatatactatatatagaagtatatatatatcatatacttcttatgatgcccagcatatctattcttttctttgttttccttgttttatgtttgttttctttgttttatatcatatacttctacatgtagtatatatcgtatacatcatatatagactatacttctaagtgtatggtctctatacctgtgtcatcagcagcacctggaaacttgttagaaatgtaaattctcagtgattctcaaacttacttgtgtgagattcacctggagggcttgttagactccagattggtggggcccaccccctgagtttctgacccattaggactggagggaagcccaagttggcatttctagaaagttccaacctccctgattttctgatccattaggactggagggaagcccaagttggcatttctagaaagttccagccccctggagtttctgattcattagagctggagggaagcctgagttggcatttctagaaagttccagcccccgagtttcttctgatccattaggactggaaggaagcacgagttggcatttctagaaagttccaggcccctgagtttctgacccgttagagctggagggaagcctgagttggtatttctagaaagttccaaccccggagtttctgatccattaggactggagggaagcccgagttggcatttctagaaagttccaatccctggagtttctgatccattaggactggagggaagcccgagttggcatttctagaaagttccaatccccggagttgctgatccattagaactggagggaagctcgagttgatcctgatctattaggactggagggaagcccgagttggcatttctagaaagttccagctgtattagttaaggtctgtataaaaacagaaccaatcagatatatatatatatatatatatatatatatatatatatatatatatatatatatatatgaatatgaggagttttattttgggagttggctcacttgcttacgaggccaagaagtcctgtgatctgctgtctgcaagctggagacccaggaaagccagtggtgtaattcactgtgagttcaaaggcctgagaaacccgggcttcaatgctgtaactctcagtctgaggctataggactgacaaggtgtgggatgggggtactgatgtaagtctgggagtctgaagacctgagaaacaggagctccagtccctgcgggcatgagaagatggatgtcagagctcaagaagagacaggaagttcacccttcatttatttattgtggtctctccccagtggaatataaggtgctggacagcaaggattttagtctgtttaatttgccgctgtatcctcagcactgaggtcactgactgggacatagtaagcactcattttacatttttggaacaaatttacttcaggcacagataaagtttacctgaaccaaataagtgaacagaattatttataggcccctggtttattaatccacttcctgtccttcatggctgttgtttcatatttgattcatgcatggcataaacatttatgacaatcttgttcatatcataattgttgttagcagctaacatttattgcagacttaatagttgtcactgtgttaaccacttcaatgcattgtctgatttaatccttatatcagtcctacaatgtctttgctattttatccccattttacagatgagaaaaatgaggctaagagagcttaattcacttgtctagtgaattcacatatcacactgcgaggtgttatgggatgccggaattcaagcccagatctgacaccaaagtcgatgtgttctgaacatacaaactgctaaagttccacttcaagtgccttcttgctatgtggctggccatgactctttatagctgaatccccattgtaacttgctcataaagttgactggcattggttgagtcatatttccaaacatcaggtgacactaatagcactgactggaacagaattcagccagctcattgtttgaccattccactttctccttttctgtcttcttatgtggttgaatagtgtgctatgaactctttccctatggatagacattcacaagtttttgatgttctgcatagtgtgctgaataatactgaacacatctttaacagtaaccttaggataaattaataggtacttttaattataacataggtatactgtcttccagacaagtttttttttttttttttttttttttgccacatagtttactcttttttccccatagtgtggttgatatgatttggctatgtccccacccaaatctcatcttgaattgtaattcccataatccccacgtgtcatgggagggacctggtaggaggtcattgaatcatgggggtgggtttttcctgtgctattctcatgatagtgaataagactcacgagatctgctgcttttatgaagggcagttcccctgcacagctctcttgcctgccaccaggtaagacgtgcctttgctccaccttcgccttccaccatgattgtgaggcctccccagctatgtggaaccatgagtctattaaacctctttttctttattaattacccagtcttgggtatttcttcatagatcatgaaaatggactaatacagtggtagactgaagatctagcagtcttatggtgcattagttgatagcatgtgccgttttcaaagacattaacatttgttactgtgctcagacccaacacccacccatcaccattgactctcagcagatcctgtcaccagaggccatccacctctggtagagaacacaggtttgcacttctatgttatccactctcgaggactttgtctttatttgctctctcatttccatccttttaccttgagaccctttcttcttgtgccaagattttgcatttatcctgcttctctgtcttcatcaaagactgtccatgttatgaagattgagaaactgaggttgatcaaacagttataccaattgtacatgaaataagtcaattcttttgatttttttaagatgacatctctgtaatcacttaactgtcttatcttctatgggttctgtaccacacaggcatgatcatttttctattttaacttgagtttcctcttaagatgtagaaaaagtagtttttatctcctccatgttggtcaaatggccttctgctaatgatgcaattagtgaaactatgcgagacaaagggggagatctttcagttttagaaagtcaatgaagtggcaaaatctgccgcatttgctgtatgtgcaaaatatttcacagagctctactgtagtcttttttgagcagctactgtagttgctgaagctaaattataataatttgatgactgtgtgcaaaatgaattcgctaaagtactgcctcctcaatggctatcagatttggtttagagtggggaaaggctctctctcacctcggtcacacccagaaatctggagatttccttacctagcctctctttgctaccttctctccaggacatatccccttttttttcttcttctttcagaattctgtttcctggtaaacaaactctgctaaattcttacccacatggagctaccgtttgatccagccatcccattactgggtatatacccaaaggaaaataaatcgttctaccaaaaagacacatgcacttgtatgttcgtcgtgatactattcacaatagcaaagacatggaatccacctaggtgcccatcagtggtggattggataaagaaaatgtaatacatatacaccatggaatactatgcagccttaaaaaagaatgaatcatgtcttttgcagcaacatggatggagctggagttcataatcttaaatgaattaatgcagaaaaaccattggtgatatcttcatcactgatgcatgtttcagattatttcttctgtaccttcatgtaaaatttctattcatgaggtccatgccttttgcctatacccatctctacccatccctgtggtttgctggagatggcttgtgctggctttggagagctagttgagcacttcttttttgtgttctgcatccaattacatcatgttggtagcttgaaattggccatggtgggagtatttacaccatgaaaattggccagtgctacaaatcagagcgaattacttaacatttcccagcacaccactaatcctttttctgtggttatctaccttctttctgatcaccttcctcatttgttgaagactttggctcctggatcacaatattctttcttcctccaggtcagacaacactctcagagattttgacatctatgttgaattagtgagtgagggccagggctactcactatcctgccatgggatacagggaatataacgtaacaaaggattgtttcacatcctggcatttcttcctagcatcctgttggaaagtcagctagttaaaaaaaccttattataattatttggacctagaacccaaattctattttatatgtagcacaaagtattctttgtgtaactttaatacactccccataaattgaaggagaattgtattatattttgtctggaaattcaccaagggctttctcatcattgaaaaaaattcatgtccccgatggcaatgctaccgtggtatttgagtcacctgttcaacacaccttatttttctgtattgaggctattgagttcaggggattttacatgagtatgcacagagaatattccattaggtcttctcatatagttgtacccaagacatattaaatacatattaattattacaaattatatatatatattatcctctttgtactagaattggagcttcatggtgagttttttaaaaaaaattatattattcatacaaaaatttgtaatattctacctgtattttagaggtagaaaatttgtattatttcatttcagggtgactaaaagggtgttatattataaaagaggctgttagattgtatagggttgagagacctgttacaattcccttcagctgctttgagttcccagtttctgaggattgcttctcctccatgtaattcctaagaactggctctggacctattcaacatcaagacaaccccatttttggaagctcagaggcatcttttataagcaacctctgatccttccagaaccctccttctcttatgctcatttcacctggtcttctacttcagagaaacttccagaatctagatccttccattttctccttcctgtcttctcattgatgggcacatagtatgctctgactccatcccctgtggatggacattgaggctgtttccaagttttcgatgttctacatagtggggtgaataatattgcatgcatctttagtggtaaccttagggtaaattcccagaagaagaattggatgcttttttaaattttgatgctattaccacattagcctccctgcatttggacagtgctacttcatgaaacaaaaagtatatattttacttagtgaaacaagtgagatggttactgaggcaattgtcattcttctcggtcataaatagtacctattttgatagctttctttttccttttctgtagaccacactcatgcatccttcactgctaccagccttgttcaagacacttgaattattgcagtggcatcttaacagtctcctgctttcagcctttttgctctgacacagtctgtttgcagttcacatcctttcacttctcaaactcttggatggcttccatgtcccccggagcgaatgctcaaacctcccacagtccatgtgctttggctaccaatgaccctgccaacgtcgtctccctccatctccttctccctcctgcttagccacacttgtctccccagggccttcgcacttgctttcttcctcgtttgccgtactcccagctacccacagggcttcttctcccacttccatgagtgctctgcacatgtattgagcaggacttcgcagccactcactatgaaatagtagtccctccctctccccctgagttacttttctccacagtacttataatcatttgatatatttactgctgccctgaatgaggccagagcttgttctgttttgttttccattgttttcttatttcttccatctccagtacctggcatataatagatcaggaccagatggtaaatattgtagtctttatgggccatacggttctgtccaccctactgagctctgacactgttgcgtgaaacagccacggacaatacataaacaaacgcgcacagccgaattccaataaaactttatttatgaacaccataaatttgaatttcatataattttcacatgtcaggggatattgttcttttggtttaaaaaatgtaaaaacccttcttaacttatgagccgtacaaaaaagggctgagagcttgaattcggtctgaaggttgtggttgtgcttaaaagttatttgtttcatgaatgaatgaatatgaaaagactatgtatatattaataactttcaggcatgtatcataatctatgtttaagcctgtgcatttggaaagatatggcacagaactaaatgtgccttttcgctatagatgtcttactcattttgacatttcaaccatccctcaatagacaaagggatcactaggatctggtttagtaaaagtctgaaaactgtagtgtagcctatagacgataatacaaatcatctgctttattatatatgtattttaataaaacagaaaggggtgaaaagactctgtgtattttcgactggactggacatccacagctttttcctttgcctttcatagtttatcttaattgaacttccagcactgccatcgtctttctctgcaaactctgtttggaaaaatagaccttaagaccccagtaagagcactcaaattcctcagagcaaataacttaaacataacaaatcgaagcttacaaaagtcggaattgtaaaactaatagggctgttaaaaccagctttcctgaaaattatgaattggtagccctgtttcttataatggcaaatagtgaatcttgatcgttcatcagtgcacatgtcataaattaggtgctgagagaggctgcaaaattctttatagcatcacagaaagctaccgtgactgccttcatatcacattgttagattccagtggtgccggcacagatctggcaatgaaagttttaaaattgtaacaagttgtcaaatgtttatcaacgggattttatgaaggactaaaaagttacgtacgatactgcacagaccattaggggaataataatagtaataaagagactttattctcatcaagacttatgtggcagctagcttttctccccaaacttggttattggaggatgggagaggcaaataattcaatgctaggagtagaacagcttgaagcattagatggaatatctgtattatgtgttgaatagaatataatgaatatgtggggctatatctctatagatatgtagatctctctctgtatttatggagaaagatattcaggattgaaacgcagccttaacaaatgccttgccaattgtgttttatgggttctgcctgcggtgtaggaagaaggatcaggctgagttgggttcggttcctgactcctctgtttaatatttttgtgtcttctctacactgaaattacttcttgtttaagaggaggaacagtcataaagcctactttattaggcttgttgtaattttttttaaataaaacatttagcacaattctttacacatatggagccaaaacccaaaataaaaatcctaccttcttcccttatcagttgtgtgaccttaggctggtcatattacctctcccagcctcagtttccccatttacttagtggtgataatattttctattcactaatcttgtggcattgtgtgagaattaaatgagatatcttattatctatagaaagcctagtacactaccagtcacttggcatgtgttcattataagatcctttttcttttattcaggggtatattcttaaaagagagacaacataaactatatctttggagatgcaggattataataactatattttataagtcaccattaatgcttcctcagaagattctagaaatttaatgactatcacaagtttatgtgtctataacattttgctgaaggaagcagatatgtttattatcaatctcttctagactgcaagatccactagagtagagagtttgtgccttttgttcacctctgcatccctagcatgtttatttggcacagataggtgctcaaattatagttgttcagttaatagttttaaacaaatatatttccagcagggaaaagccataaataaactcaccaattcacattctgtttgttcctatgcaccaagggtaggtgtacccttcatcaggatcccagccggaaatagatggcgcagcccacctgggtaatttgaggagggtatacaaaaacggtgtgggcagtgtgctgggagaccaccagggaccatgcagtgctctggggctggtgacaagaggacgctggcattcattccttgactagaaggaggaaagggagaggagctgactgactgagggaggtcctgcaagcctgtgagctgactgggaggagaggaagtgctctggcagggctgggagctaggagctgggagctgggagctttccttgagggaggtgctggctttgcaggtgtccatgtggtcaggctgaaccatacttcctggaatcctcttctcagtggtgtggctggggaagggtacagagaaactcttgtgtgggatttggaggaatgggcgtgaagctgcagcccttttgtggctcacacatggtccctatctgctgattcccctcctcggcctgctctgttgctgtttcctcttcccctggcgtctcctttcagctttcctgactcttagactgggtgtatgttcatgtcagtgatgaagggtccggtcactgcaggccaccctcatggacatggtcagaggcaacaagagttgacacgggtttccatccatcccgtgggctgcagctcctccttgtaggcaccagcttgtctctgctttccctgactttacatccagcttccctccctgaccgtctgccccatgagcctggagcatgggacactgcctaatgtcacctccgcccatgagtgcttttggtcaaatccctgcacaaagccatacctataggtatgcgttcacacacactcacccacattagtggtcctgcttccctgaatgaaagttgtcttgggctgctataacaaagcgccatggcctgggtttcttctgaacaacagaaattcattcttcccagttctgggggctggaagtctaagaacaaagttccagcattgccagattctggtgagggccctcttccaggttgcagactactgacctcctgtgtctgcatcctctggcctcttctcacgagggcactaatctcattgatgagggctccaccctcatgacctaatcccctctccaaggccccaccctcctaacattatcacattgggggtaagaatttcaacaaataaatttgagaagacacaaacattcagtccatcacaaacactccttgaaacaaggaacacagtcagtagttggtgacaccattacaactgaccaagagtggagagaattcataccttgatgttcctctcctccctccctgagatactctgctagtgtatcccaggcagcaaaccccaccagaaggcagaagtcatcctcatggagccctgcaacagtgaagaagggtggagagaggacctagaagtgcaaaccatctctagggagatgtccactttaaagaccatttggtaaatttgttttaggtaaattcaatttatttgcatgaattgtgaataaattcacctaaaacaaatttactaaatggtctctaatgtgtccattgtttcatggacacgagtgtcacgaattctatcaacatttattcacacctacggaccaggcgctgtgtggaatgctgagacacacacacacacaaagactaattctaaagtggcaggtaatttattgggtatcactgtgtattttgttctccctgatgtatttcccctgccatgcaaagaaggaaaccgagactttgaatttgcctggttgaatttcaacaagtctgtttaaatgcctcatttagcattttacagcagcttgtgtgttgtagggccaaaggcaagattttccaagcttaaaatttggaaaatctaaagtcgtttgaagggtattgtgctggagggatggagaggagcatttttgggaggtggaggtgggagcagacagaatagagggaggatggagagcgaccttatagctggcaaagaaaattggcttttgcatttttttttgctgataaaatgggtctgatccctctttgctagtgccccaggaagtggctgaactttagaggggatgtctgtgtgggactccactgacagtattctgtagcagtggtgtgtatgttttgggggacacagcatttatcagcagtgatggttatcgtctgaaaaccaaagatcctttttctgaatattctaagctgcattcacctcctggggtttatgcatgatgctagagagggttagagagtcccctccaagactgagattgagtttcctactggtccagcagaaggggcccagagctgattaaacttaatctcaagaaataaagaaatgtggcattttatggactggatgttgctggctaaaatttatatatttaccatggttacattcatggcagctacttttgcaaggcacagggctaggtgcttttattctttaatttatttgccaattcaatacatatttattgagcgcccattttgtgttaggcactgttcttagaatggtgcttagcattgaggatacaagagtgaacaaaacagatgaagccccttgtggagtttaaattatggtgggaagctgtaagacactggaaagaaccaaagtgttttcttagtgtcacataccacttaacacagccccttcaacgtcagatgtgtgggttttttcctctatacaacaggcaattcttcagttgggaatcctataatttagttcaattctgacactatctacctggaaatagcatcagaccccacgggttgagggctcagttccacaagactgaccctcccccttcagatgccaatcacaagtagtaagttgtcacctatacttctgaccaatcagctataaatcaggggttaccatgactctcttttcaggtttgattaatttgctaaagcaactcacaaactctgggaaacactttacttacgtacttacatgtggccatttagtataaaggatattacaacgagtgcagatgggcaatgaagagatgcacagggcaaaccatgtgggaaggaatgctgagcttccgtgccctctctaggtgctccaggtaaaggttcagctgtctggcagcaatctgaaccccgtcctgttctttttttgtttgtttgtttgttttaattttactttaagttccaggatacatgtgcagaatgtgtaggtttgttacataggtatacgtgtgccatggtggtttgctgcacttaccagcctgtcatctaggttttaagccctgcatgcattaggtatttgtcctaatgctctgcctccccttgcccccatcccccgagaggccccagtgtgtcccctccctgtggccatgtgttctcattgttcaactcccacttaacgagtgagaacagtttaattttctgttcctgtgttagtttgctgagaatgatggcatccagcttcatccatgtctctgcaaaggacatgatctcattcttttgtttggctgcatagtactccatggtgtatatgtcccacattttgtttatccagtcaatcactgatgggcatttgggttggttccaagtctttgctttgtaaatagtgctgcgataaacatacctgtgcatgtgtcttcagtgtttgtaaggaggcttccttacataggcatgactgattacatcattggccattggtgatcaactcaaccttcagctcctctcctctccttggaggctgagaggtggggctgaaagtgccaaccctgtaagcctgccttggtctttctgttgaccagcccccaccctgaggctgtctaggggccaccagcccccagtcttctcattagcatacaaaagacactcttttcattctggagattccaagagttttaggagctctgtgtcataaaactggacaaagactaaatacatatatatatatatacacacacacgtacatatgtattattatagatcacaatatcacagaagcagagactcagatgaaacacaggaaggagtcatgggaaaattggatggaagagcattcgtcgtactgagggaacaggaagggcaaagccctgaggctgggaggccagtgtggctgcagagtagagcaacagagacaaggtgagccggagagggatgggaggagaggatgtgcagattgggcactaagggctttgtttttactagcatcggatctattaataaatatcacttagtccctttttttttttgagacagagtctcactctgtcacccaggctggattgcagtggcacagtctcggctcactgcaacctccgcttcccgggttcaagtgattctcctgcctcagcctcccaagtagctgggattacaggtgtgccatgatgcccgattaatttttgtatttttagtagaaatggggttttaccatgttgcccaggctggtctcaaactcctgacctcagttgaacccccctgccttggcctcccaaagtgctgggattacaggcatgagccactgtgcctggccggtccctattcttgagtaacttttagtatcttgaggaagaacaacctgtgaactggcagcttcaaccagtgtgcttagtgataaggctctattccacaaaaataaggaaaggcatggggattcagtttggggagtggtataggagcttgccaagaactgggaaggatctaatatttttaccctacttgcaggctatcaagttacctgtcatggttctttaaacgctggcagaagatgtgagacttctgggttagagacaaaggacttcattccacacatcacggcttgcagcgggagcctcctcgtgtttgcattggccccttggggccaagaggaatggctgaggtagatgccgcacaccgttggtttgtgtcatagcagaggaatcctgaaattaagtaacccaatctttaatacagggcttcaagcgagcctgtcccacctttgccctagagggagacattatctttcttttgttgaccaggaaacaaatctgccctctgctctagagagaaacactctctctatcttccaaccccgcaacaaaagctgtcagggcctctgctcacaggacataaagaaacgtgagagatccatggagaactgtctcctgggggttaagttagagaaccctagactctattaatggttttataagttgacactgttttggaccaggttagataatggagttgcagttttcctgactgtttggatgttctagagtgagacaaggaaaccattgacgataacgagcaagtgaagtggtagcgaggggataggaaatagactaaatgagtcacttgagcatgtttcagcattcacttatcatctttttcaataatatttctgcaatgcctactatatgccaggcaccaacctagaggcctgttcgtgatgaaaaaaggaacaggctgaaggtctgcagggcaggctacgaagaggtcagggctgcctgtggtctgatgtttctcaggctgggtgcatgtcagaatcacctgggcagctttgaatctttcctattctcagaaggccccagaatcatgaaatccaaatctctggggctgaggctcagggatttcgtttaaagataccttcccagatgattgttacaggcagcacaggcggagaacgcagccatgggtgagtgcatgtgtcaactgcttctacagcccagcccgttgctacgaggctcgcggttgcttcccttctgatggggcttccgacagctgctgctctcctcgattttcttctctgagggcccagtgtcctttgaggtgggggcctcaggtctgtactctcaggataagatctgattccaacacgtaattgataattcttgttttaagaaaagtggagtgatttttctccagctccaaggtctagggcaggacattttaacctgcctttcttctgggcactagtgtattttgggtttttggcaactatgtccagggatgtgtattgatcaccagtaatttataattgcatagatatctggataggagtaaaacatggacttagaagaatgtggcttcaaagtctattctacccttaccagctgtgtgaacgtctccagacttcctaacttccctggggagcctggcaccatggcttatgctcataatcccagcactttgggaggctgaaacagaaatattgcttgaggttaggagttcaagaccagcttgggcaacatagcaagaccctgtctataaaaataaaaaattagccactgggtgtggtggtgagtgcctgcagtcccagccactcaggaggctaaagcaggccagaggatcactagagccaaggagttcaagggagatcagcctcttctttagcaagaaggagatgatctcactttttccactgagttgttttgaagattaagtgaaaaatgtgtctaagccttggaactgtgtcttggtacatagttagggttaaatatattttaattgtctcattgcctcattaaaacaaccccttaagcaggaactatacatctgcattttgctgatgaggaaactacagcctagagaggagaaataagaacatgaaagtagcaaataaggtccttcctttccaggagctcataatttagtcgagatgatatgaccttcttggaaagaatgatttaaaaataaacccaggtaatgattcaaaactccattataatgataaaattgtgagacattggaacaatgtctcccaactgtaatgtgcagaaggttccctggagcatatcaattatcagttgaagattcccttgctcgggctctgatcctgaagtcagaagactactattcaacagacagatggctccagaaggctctgcacagttgatgtgtcaaccacacataaagaaacagtttgagaattcccagtcagaagcagcttcttggaagacgcaggctttgaattaggccttaagtaaaatctaggtaaagtatggatgggcagagaggacaagagaggatattttgtgagaggggtcaagtcatgagcaaagctgagaagacaggaatggatcatatttgcagaaataaccatgttaatatacatagtaattcaagtttattggctttgctggactttaataaggtaagtattttctcattttcatgacctttttcttgcaaaaaaactgaattaacaaacctcctcgattcttgaaggtcttctctccaacagccccacatctctctcgctgagcgccacaccttggtgcatttggatattgatacgcaaacctaaattatgcagaaagtgaagctttgaaaggcaggcagggagaagtgtcctcttgattaatggtgaggcaacatgtttcaagtgaggtttcaagttccaggaacttaaaacctgtctgagatatacaatttgggatagattccactgcaaactgggagttaaggtgacaagctggaccatgagttaaaaaaaaaaaagttccctctgcccccaccccactgaagtgtgtttgtttgtttgtttgagacagagttttgctcttgtcacccagactggagtgcagtggcatgatcttggctcactgcatcctccacctacctggttcaagcgattctcctgcctcagcctcctgagtagctgggattacaggcatgcaccaccacacccagctaattttgtatttttagtagagatggggttttaccatgttggccaggctggtctcgaactcctgatctgccacccttggcctcccaaagtgctgggattacaggtgcaagccaccgtgcctggccgtttgtttgttttagtaagtccaccttttctgtagaggggacttttctctataatattaaaaattagtgaccacaattttaaaaatggaattcccacttcacttggcaagttaggaggttggtatattgcttggggtacttttgttggcaagtaacaagtaaaaccttattcagaccatcttaaatgataagaaaaatgatgttcttctgtaacacgaaggccagaggttggttccaggtgtggtgtcacagggatctgctgccccttcttcaggtgccctggactctgtcctcatccgtgtttgtctcttagcaagatggtggcagcagttttcagtatctcaagaagacacagtgttgtccagggaagaaaaatgatgttttcctgttttttcctttggaagtcctgacatccaggtggacttccttcatgtctcaatggcaaaatgggttacacgcccattcttatactgaacactgacgagcggagtagatttcttctaattggcaatgtagagaatagaataaaagtaggaccaactttccaacttatgtaggagaagggggttacattgacaaaagaagggggttacactgactggattttgggaggcaaccaacaacatccattagaatctgacattgctggttccagattccttcttggcaaatattgggtgtagcttgatgtgtgttgccccttttaaagggcagcatggggtcttcaatttgccacatcattccctatctgtattattttgtactctatttgcctccctatatattttatctgtttagttcctataggcacttgtgtttgggaccccatatctacagacacaggcatgccatacttttgttaagaggtgcttctaatcaatatcatccagcatgcttgggtaatcaatcagagtgattgtttaattgctcttctcctctgcttgtcagcctttcaacctttcaaaggattgatctcttctttcctgttgtggccaacttcccctctcatgtcttactttcggtggtatcctgatcccgtgggccaccaggaaaagcctaacaaaagtctctggttccatccgagcagctgcagaaaagtcttcaagaatctgagtcttctaaaagctgcctccataatgaactagtcttagtgaagagagaaaacatagacagtgtcaatcatggccagtgacagggtgcaattaacccaggatcaaattgcagcaagatggatggggccagatggtcctgttattctaacaaagggattttatagtaagtgcccttcagaagggagacatttttctacatagaactctggaatgaaaagagacaagggtgagctcttcacaattttcaaacagatattatggagtaggaaaactagtaaatgatgttttaaatcatcattccaattcttaattggtgactggtaaggcgtacatacactgtccgtgttgatagtgcttgaagctataactactagaaaattctaggctgaaaatatcttaaccatgaaagacctccattaggaaattcagaatcttaaatagagtggggcaaataatatagggaaagcgaattgaattaattccttcttacagtaagaatgtttaaagttcttatacacatgcttctgagtgttaggaatatagcaatgaacagtttggatgtctttgctatctgtaaattacatcccaacaggaagacagagttaataaaaaagtaaacaacatatagaaaagatgatttcagaatgataggtgctaaaaaagtgaaaaaagccgaatgttaagacagtgaaaggtggggagtagaagtgggtggtggtgtgttggtaaatgttcaatacctggttctctgggggaaaaaagccttggttttttttgtgtttaccaatttctttggcgtaaatactcccaccatggctgatttcaagcgaccagcgtgactacgagttgggaagagatgcacacagtataagccagctcctgcacacctctgggaggtgttacattactttcagaaaggactgtcaggttaaggactctgacaaaatcgacctatgagctgagatatgaataagaagttagtcatgagatgaccgggcgtggtggctcacacctgtaatcccagcactttgggaggccgaggcgggcagatcacgaggtcaggagattgagaccatcctggctaacacggtgaagccctgtctctactaaaaatacaaaaaaaattagctgggcctggtggcaggcacctgtagtcccagctacttgggaggctgaggcaggagaacggcgtgaacccaggaggtggagcttatagtgagccgagatcgcgccactgcattccagcctgggcaacagattgagactctatctcaaaaaaaaaaaaaagttagtatgagatggaagattcaggggaagagctttccaggcagaagggatatgttacaaatacaaaggtcctgaagtaaaacaagttttgttctccaggggaaaagaaggtgttgatgtataagaaaataaagagataagttggggtaactcatataggtcctggaaggccattttaaaaaatttagattccattgtaaatggaatgggaaattgtaagaggtttaagcaggtgagcagtatactatacctatttagcaggaggctgtttctacattttcatggaaggaagtcagcatagggttgttctgtagcagaagacagagaagcagaaatagctgactttgctgatgttatggtctaggttttgagtttgaatttcattctctcaaagctgtatatgaactgattagcatgatgcctggaacaccataagccaggatgttcgttgttgtttctgcactggactaacttggagatcagtcttgggaaggtgggtgatgtatcaatatcatcgggaatcacagagcgaagacatcacagtgtagggcttgcagtggactcttaacatgttgctgaagatgtgggtaaaagaaatcactatctccagcttttgaaacatagttcaggttacagagagatcaggtggatgcttatcccccagggatgagagttggccagattataagctgtgtttcagtcttcagttgtagtgcatttgttcatttattcattttgtctgatcagggacttccattcagccaccaaagcagaccaccacgtgacaccttcatatagggcatttcaagtgcaagggtatgaaagaaagattcgttatggggttttccttgttgctattgttgatttctttctctcccctcctaccatcatcaactagtaagtagggatcctttaaaatagtaatgtaggaatattattattatttgtattgacagaaacaaaagtttgatggtattaggaggtagcatttgttgcattttactacatatttgtgcagtatgctcagtgctttatatacttaaacattgcaacagactgtgaagtgagaatattgtaccttttattttacagatacagaaactgatgttcagtgaggttgagcagttgccccactaaagcccatggcttaattattagtggagcccacatccacgccagtttctgcaaacgctccatagcttctacccccaatcctaaaagcgttcgcaggaaatgcgcagctttggaaactttcatcctatgtcttctcaacttggtttttggttttgactcttttcctgctgccactatttatgttcagtatctctaaggttttcatgctaccttcctaaggggcctctgcactttcagtatctcctattctatgctgtctcatgaacagctttaaattgaactctttaaaggacagcttggtccctgttatgccttgacccagaaacctcagtggctccttactggctgaagagcagacctttcacgctggggagagctagaggaggcctcgacttcagcccaacgagggactgggcattgcattttgttccgctgtggaatgctggctgctgtcggggcccacctctcatggcactctgtgttttcccatctctcagcatccacattagaatttctgttcctggaaggcagggactgtcccaggcatctgagtgtaaacagcatgggtttgcaacatgacttcactcactatctctcattcctttttccttcgaaatcaaatctaatctctcccaaggccatttcttggatttggtgggaaatctcactcttattttttttaaaaatagattcctcgctctctctaggagagcaaaaaaggtgtaggcttttctgagtgtctgccagtcttttgggctatagtcactctctttgcagcctgttgccctggcccacgtggtcctttgaagagctcagtcctgttctttcaactctaagcttgggcaaagggcttagttcaggctcagtttgttcataaacagccagaacataatagtggctattacgtaaaaacaccagaaaaggaggcttaaatcaaacatagcactttgccagaacatgagctctgagtttcaacttcccaggtcaagcccagcccccaccatttataggcatatgctcatggacaaataactctcatgcctctgtttcccccatctgtaaagcatggggatcaatgctgtctccttatgcatttatgatgaggactagaaaggataataagaataaaagatttagcataatgcctatcagagagtaaatgcttaataaatgtattttatattttttcgcctttcaagaatcttaacttctctagtgatgttgtggggttataagagctgtacctgtgacagagacttcagtattccttaggagtagagcccgcccaatttctgccagtcttgcgagcacctctccctagggaccgtccagttaggtgactcctggttgctcaacctcatagcattagtttcttcatctgtgaaatgagagtgtaaggtaacttgcaaaatgttgggaagccactttacacatttaacacagattagcacataatgaatgttaagaggaagtcaagcaaggaatataatggtcttagtacagtgtctagcatgtagatagggctcaattagggtcagctaccaccatcatttatttcattgtcgtcaacatcatcattgccatcctcaccgtcatagtctcacctcacataggagactgtttgaacattgcagtgaataatatatattggttaagtagtccacataatttgaaaaacaccagaaaaggaggcttaaatcaaagatggcactttgtcagaagttttatgtatatccacttcttttcttaacaagcacttcttaatagttgattcccatggttttgcacttaatgatatctaaatatattaaaaatttgcctcatctggctgtctaaatgatacaggattttgatcagccttcctcgtgctgggaatgaattgattcagtttaaatattttgtctaaaagttatttagcctggaaaataccagtctaattcccttacaagtaagaaaattataaagagagagatctaatcagtgggtagaatatagcctcagaaaatgtgtaccagcataccttaacgaaagtagaataaatcttgaaactttaacattcccctttcttggacctaaataggtccctttggaaaactattttattgtttctcattaaattagaattgtgctgaggtgccactatctaccgtttcctattattattaatataaaaaaattcactgcatattcagcatttcccccgttaaagccaacagaaaatcttccccgcttttgtacttaactctgggtcatttttaaacaaagtttctttttttgtttttgtttacatctgcatttaaagagagcaatattttctagggacaattaaatagatgtaatgcataggtttactcctgcttggtgaaattagcaggtcttgtagaagaaggctgaaaagaatgacagtggcaagaagtgtcttattaaccctaggcagatacagtaatttctgggaaacagaattttggaagcatcattttaaaaaacacaggttgatcatacattagaaaggatacactcaaacttttaatccatcagtgagatgaaaggtttgatgaagattgatactgaagttcttactgctgcatagaacactcttactgttcacagtatttctaaaaatgagacattgcagtgttttatcttcttgattcattcaagagacagatactgagtggcaacagaggccatatgctgggtgaccagaagccacagctgacccagagctgtgtgatgtttgggtctggggaccatattccatctggcaactgttgctagcgcctcatttagacaagacctccctctccagtccccttccatatttccagaagcttcttggctctttagacacagttttcaatctttgcataaaaagcatagagcagctgggcgcggtggctgacgcctgtaatcccagcactttgggaggctgaggtgggcagatcaagatgtcaggagatcgagaccatcctggctaacacggtgaaatcccgtctctactaaaaatacaaaaaattagctgtgcgtggtggcactcgcctatagtcccagctacttgggaggctgaggtaggagaatcgcttgaacccaggagatggaggttccagtgagccgagattgcgccactgcactccagcctggcaacagagcgagactccgtgaaaaaaaaaaaagaaaaaatgcgtagagcatgtactatagctcagatcctatgtactatggtctgaagtgtcctgcaacattaatatgttgaaacttacttgccaatgtgacaatattaagaagtagggcctttaagaggtgattaagtcgtaagggcagaattacttatagatgggattatggcctttatcaaagggcttgtgggagtgagtttgttgccttgcatcccttctgcctgtgaggacatggtgttcgtctcctctggaggaagcagcatgcaaggtgccatcttggaagcagagactgggccctcagcagacactgaaactgctggagtcttgatctgggactttccagcctccagaactgtgagaaataaatttctgttgtttatttattacccatttttaggtattttgtcatagcagcaaaaatggacagaatcactatgttaggacagagccttcaagttacaaaggcacagaaaatagagacccattttaccacttaaagtaaatgtcaatgtcttcctcgaggctgtcataataattagaagctcctacatcatagcccctcccccaatcctcaccaaattgtctaccactttctccattgcctactctgtgccagccatgtggatctccttgtgatggtatccatgccaccttctcacttctttgtagttattgctgaaaagccaccttgtcagtgtggctttctctggccacggtttttaaacttatgggagcttcctccagtttagcactgactaatccctttcccagctttatttttcaaccaaagcctttatcacaacccaacattctaaatatttcagttcatgatttattcattgtctgtctcttccatattagactggaagtttcatgagggcagccacttagtcttatacgccattgcctttcccatacctacaacagtaggggtgtgtaaatcacattctgtgaaccaaacaatgtggttctcatcagatctcctccagccagccggtctgcctgggagctggaggtacaacagtgtaggttcctgataaaaatgttcaacaatgaatgcataagcatagtatatactaaaagaggccccagatgctaggggactgcaagtcactcagaggctggggtgtggaatttgagtgtgggacagtgaaatatgagggtggaatagtatagattttggactcagatggtggacaagagagagccatggaaaggtgagtgagtgaccagaaggcagaagagggacaggattaccaggaatgttttgctgttttgcaaaccaaagagatgtttaactgttaatctccatgagtctgaaagtagggcctttctaaaaaatgtttaaaaataataaaaatactgaagagtctgcttagatagaatttgaataagctccaaaggttgcaatttactttggttttcccccaaaatactgacttaatttcaaacaacttcaggccttagagaactgatcagagaaggtaaaataatgaggtggctccaggatgaacaacatagagtcatcccaattggattcaaattccagttctgctgcttgcttgccatgtaaccttggaacaattacttaacctctctgaacgttttttctcatctgcaaggtggaattaattagacctacacttccaagctgttttgagcattaaattaaaatttttttttggtcacatgcctcctgtaatagtaggtactgaatatatggaaactggatttattaaagcaattatgtatttttatgaatgatttcacaaatgaatgcatcttatttttaaccaatgtgaaaggtgaactgaattcttacaagcataaatgccttaaaatagaacattatggctttttttctgtctttgatttggcttcttaagcatattgtgaaatggaatataaaatatacaatatataatatatacaacaatatacacatacttgtattttttcttagcacctcataggactattttattttattttattatttatttttcagtcagagcctcactctgttgcccaggctggagtgcagtggcgtggtatcagctcactgcaacctccgcttcctgcctggctaatttttgtatttttagtagagaggggatttcaccatattggccagactggtctcaaactcctggcctcaagtgatctacccgccttggcctcccaaagtgctgggattataggcttgagccaccgcgcccagccagactatattttattatattaggtgtcaacatagcactcagagtgtatacaaccatctctacttgttgcatcttatgtatttccctaatattggcgtaagttgctgcttcagtggaagtatgttcttgagttgtagaccaaggctaaaaatctcttcctcttttgaggagtcagatagactctgctttgagaccatgggaacagtacttcatcatttcttgaatcctgtgagtactatggattacactttatttaatatatacagtatgtaaataagtttcagaggcataaaagcttcaaaactaaacgaaaaggaaaatttaataaccggcagatttttagattgtgcactaaataatctgtttttcattctaagaaaggggaggaggaaggcagagtttaatagacgtatataacaaattaaaattcagtatctggggggtgtaaatcacattccatgaaccaaacaatgtggttctcatcagatcttctccagccagccactctgcctgggagctggagcataattcaaccaactgtaaaacaggaagatactctcgataaagggcagaagacagcacacagtccatggctctttgccaagttctgtgcagcccagctatctatataataacatgtctgtaaaatgatgtgtttagaattatccttctaggcctgggatagaagaagagaaagctataaagggaaaaagaaatttgtgcaactgtggctatcttggggtctaagagagagaactggaactagggtgttagagagtagagattcaactgcgggcaatttggcccccaggggacgtatgacataagacaatgtctgcagacttttggttgttccaatgggtgggtgttactggcatctagtgggtagaggccagggatgctgctaaacatcctatagtgcacatgacagcccccgcggcaaagaattatctagccccaaatgccaagaccaagaagccgtcgagtagagggttcaactctcactgttggcaggtttgactgtgattcccatgacttagtcatctaaagtctttggaattatacacaagtgtttttgttagaaggcccaaagttccaatatcattctagcattgtctttctcaggagatgatgcaatggatgtgaatgcattgtgtcctcatctgttttgtcttctttttttttggtgagaggccactgaattgacatgggtctctgtatttgtccattttaacactgctgataaagacatacctgagactgggcaatttacaaaagaaagacttttaatggactcacagttccacatggctgtgaaggcctcgcaatcatggcagagggtgaaaggcatgtctcacaaggcacagacaagagaagagagcttgtgaagggaaactcacctttttacaacgattggatttcatgagacttactcactgtcacgagaacagcacaggaaagacctgcccccatgatttagttacctcccaccaggtcctgcccacaacacgtgggaattcaagatgagatttgggtggggacacagccaaacaatatcagtttctgagcacttggttttgatctggcatggtgaacaaaagggcatcagtgttagaaagctgtcctgtgtcctgagagagagaaataaatgggctttctttcatgtggataagaatttatgtcttagtgaagatggcctgtgaaatggccctggattaaacacaagcctaaatcacagtgttccattatttcctaaaagtgtctccactgtaagtttgaggagaagtggtaggaaagtggacagggttttcattgcctctgtctgtgccacacccggttagtggttaaatggaagatttcagtctccagaactgtcaatccatgactttataatggcatcaaatttgttttaaaaaattcatgctgtgggctttgaggacataattgtagctcctgaaaagtttgttaaagattgcattagatagattctttttaatggacggtctgtatgcttggccatttatacttcataatagtatatttggaggataaaaaaagtatgtgagttagaggtttttcagcaaatttcactactattgctgtccttgtccaaatgtctttgaaaattttatgggagaaagaattttgtccttattatgcttgactgaataatttgttaaattatgttttaaatcagcatttcctcaaattgagaacaactaatgctaaagtatatcatggattattttacatgcaatttgcataaaagttttaaaaagtcactgcttcagtagtaccagagggctgtctagaaagattgcacaaaaccaatgtctaagatggatattgttggtgttcagaccttctgttatctaattataaaaaagcataacatagccacccaattgagtgcgctcataatcaaacataaccatttgaagtaaagtggaagcttaatgtgaaactgctgatacagcatttttaattaaagctcctttgtattttgagagtaaaattctaaatttcagtattttgatgttttctaaatggttccctcaaaatgcaggaagcagctcagggagcttcagggttcaggatggcaggggctgctgtggggttggatgtccaggacccaggccagctctgctccccagccctccagcccaagcttcatccaaaacagctccagggaatctgttttatttattggactcctgcacaaggttttttgtgaagacaggaatctatggctttaaaaagttggaaatcgattggaatagtggatagagattccaggaggaagagctattttttaaatgtatgtaagataatgcaagagacccatacttaaaagcaaaaaaaaaaaaaaaaaaaaaaaaaagattttaggctgggcctggtggctcatgcctgtaatcccagcactttgggaggcagaggtggctggatcacttgaggccaggagtttgagaccagcctggccaacatggcgaaacccggtctccactaaaaatacaaaaattagctgggcattgtgcacacctgtagtcacagctactctggagaggctgaggcaggagaatcacttgaacccagtaggtagagtttgcagtgagctgagatggtgccactacactccagcctgggtgacagagcgagcctgtgtctcaaaaaaaaaaaaaaaaatctgacctccgagtaagctgtgactccactgttttatgacacctattgtagagataaagaaagtgggacttaaagagctaaatatctcatagacacatacataaatggactaattgtgaagtgatcccaaacctatttgagagcaaagctaccctgacaacaattccagtatactgtcttccaaggacagtaattgcggtgaggctaagggtagaaacagccaaactaaaataggaataatggtttttcatgggtgatgcatctcaaatatgtgctcagaacaaaagacagagtgtaagagtagggataatttaaataatgtgacacattccaccaatacacgaccagatgagcacacacccagaatgtgagatggaagacaggaatctcctgtttatttgaggattaagggagaggctctatttttctcttggtatgagcaatcctgcattacattggttaaagatgcctgtctgtggctcagataatgaaacagtaattgatttcaatgcaggaggtagaactggctgttctgcacttacttgttaaaagctgataaaggacggaaatctttgggatatttgagaaattctcaggaggtgtaactaaaaaaaaaattgaagttttattataagcaactttcatcttacatattaactttactaacatatatctaagaggtgattttgttgtatagtgacttgtttcttgcctcataacattcagaggattaaaattgatgaaaaacacaaaaaaagtaacaaggaaaattgatttataattatttatttatttattttttaaagtgaacatgtagaaacagaataaaatggtggttatcagggtcgggtgtggggaatgggggtgggaatgagatcaaaaagtacaaaattgcatttatatagggtaagctgtagatttaatatataatgtgaggaccatcattagttatgttgtattgcatatcgataattttccaagagagtagattttaggtactcttaccacacacacacacaaacaaaacagaaagataactatataagatgatgggtatgttagtttgcttgactgtagtaatcacttcactttggatatgtatatcaagataagcatatcaaaacttcatgtggtataccttaaatatagacaatgaaatcataaataaatgcataaattgaccatttgatgaagaataaaattgtagacagaataatggctcctgccaaatatgtccatgtccagtccccagaacctgtgaatatgttacgtaaacattgatttctgtcttcctaacacagtagcgcttcctcaccaagcctctgcagtagtttttccctctgaccagaatgtgtttccctcagctcttcgcagagtcagctctttctcactcttcatatttcaggcaaaatattaccctttaaaagatactgtctacaacgaatcacattcattttctctaactacatcaagaatagcagttccgtagccctctgccagtgcagccattcaactttaacctgaaggaaagatgaatctcttgaagtttaactacttagcatgggtaaggagcatgggtatctatctgtatatggttcttagacttcatgccagccatcagtcaatgtcatatgacatgcctgccttataagaagatgtaacaatagataatgcaactaaccaaatacaagattccttttttctcccgaaattactttggtgggggttgagtggaacaggaagggcctcttgcactacagggcacactctcacctccttacaccgctttcctgtttgaagtaaagtcactgtccaaaataatttcaacctttttctgcccaagcatattctatcagatcattctgcctaatttccttcagagcattgatcattgtctggaattatcttgtttatgtatctgtttcctttttttaacttgctattcaaaagctatatggtagaaggagggaaggcaagaaggaagagaggaagaaaggaagagaaggaaagaaggaaaaattgaaggaagcaaagaaggaagaagaaagggagggtcatagggaagaagggagagaaaggggaattataaagtgtgtgtaggttctggttaatacctgcttaaatttaagactatcaggcaaaaagaacatacacagtgcccttctttcaccaagatgtgtaaaatctttttctgtttgtttgttttgagacagggtctcactccgtcacccaggctaaagtgcagtggcgtgatctcagctcattgcaacctccacctctggggttcaagcaattcttgtgcctcagcctcccgagttgctggccacatatcaccatgcctggataaattttttttttcttttttcttttttttttttgtattttagtagagacagggtttcaccattttggccaggctggtctcgaactcctggcctcaagtgatccacccacctcctcctcccagagtgctggaattacaggcgtaagccacctggcccagaggttagattttaaattaactaataaagtgtaaattagagatagttaatattatcattgaagaatgcttatgtcactgtaaaatagtgtactcatggttttatgtatacaattatacagtgcaagtatttgtaaatgtataataatgtatctataatatgcactctataaaatagtacatatgcaaaatataattttatagtatatagtcatgtgcaacataatgacgctttggtgagtgtgggaccacatacgtaatgacagttctataagattataaaattgtagttttactgtacttttcctatgtttagatacacaaatacttaccattgtgttatagtgcctaaggtattgagtatagtgacatgctatataggtctgtagtctagaaagccataggctataccatatagttaaggtgtgtagtaggctatgccatccaggtttgtgtaagtcatcctataatgtccacacaatgccatcacctaacgatgcatttcttagaatatatccccatcattaagtggcacataactgcattagatataccattaagtcactatattcatttcttgctctttttaaatttttttgccctgttcacatggttgaattcacatatgaggcaacttcaatttttctacctcatggagctgttgtgagcaacagatgacattgtgtctaactggaaaattactaaatctatatatgatagaggagatgatgacaatgaaggagaatattgatactgatgacgaaaatgataatgaagataataataataaatgatggtgataaagatgatgaaaatgatgaagatggtgaagctgaccagaatgatgatgatgaaaatgataatgatttgaagacttcaacctcattcagcttcctcagactagtatttattattgtaaggttttccatgctgacaaagaggaggaaaattccaatcataagacaatattctttctattaatcaacaaaattaaaataacattattttataatattattatatacaagtataggttatgatacttaaaacatagaaactgcaactccatctttgatttaattccatttgagcgtgtcaagcctaatatactctaatcagaacctcctgactttgatagggttaagccttaaacatatataccaaagtgcttttgtctgcattgatgtgaaagatcagttagaacaacattattttgtagttataagacttcaaaccacagtgaactttagctccctgaatgactcttcagatgtttaatatcgttctaaaaatgtacaaatgtaagagcagagagcagattagtggctgggaggagaaaatatccctgatcaaggatgaatgatgggctctttgtataaagttgcaccaggtctttcctttcctcagaaaacaaattgcgtggttggtgatttgggccatatcttcagatcataaacgtttttctgcaacaatacaaaatatgcattgttacagtcagatgagatttttaaaaaagagttgacaaaatactttaaaaataacctatttaagtataactttttattatggaaattatcaaacacatactaaagtaaaaagaaaagtataacaattccccttgtacctcatcatctagcctcaacatgttgccacttttatttcatctttgactcactaatccgcccactccccatcttgtttttcctggtatattttaaagaatatcccagacaggctgggtgcagtggctcacgcctgtaatcccaagcactttgggagaccgaggtgggcggattgcctgaggtcaggagttcgagaccagcgtggccaacatggtgaaccccgtctccactaaaagtacaaaaattagctgggcgtggtggcgggtgcctgtaatctcagctacttgggaggctgaggcaggagaatcgcttgaacccgggaggaggcagaggttgccgtgagccaagatcacaccattgtactccagcctgggtgacaagagtgaaactccatctcaaaaaaaaatcccagacagtgtatgatttcactgtaagttattcaatatatatctttatagagtaagactttaaaacaatgtagctctatattaaggataatttcttaatatcttaattcttaagaaattaagaaggatttcttaataatataaaaaacaattataaaactcttttaaataatagcagtgctgaaaactatcagaacaccttgccttaggcacaaatctgttcttactagctctggcattggtggttcagcttgagcatcctattgcaccctgagtttggcaacatgtgttggagttattatattactaatggtatagatcaggcttggcaaacttctctgtaaagggccagataataaatattttcagctttgctgcccataaggtctctgtcatgactactcaactttggtgttgcagtgcaaaagcaggcacagataatatattaaatgggcgtgactgtgtgccaataaaactttaattataatgagaagaagagggctggatttggtccttgggccagaatttgctgacccaggctctgaataaggtaatccaattccttcccaaagggggttggcagaccctggggccatcattaccttggagagttgagtatgttgcgattgaaaagcaaagcattaggattcagaatacccaaattccacatctctctagcatttggaaactcttgaataggccacttgctttttggttcatggtttcacatttattagatgaagatagaggcacctacccttcttgcttaaccaggtttttgcagacccagaagcccatggttatggaagtgtttactgagccatagttggctgctgcaatacgaggcattcattatccaccatacattgtaagtctgggtggttcccaggtaatgattcttaattatatttttatccctcttttgccattttttgggggttccagatgtaacaataaaaagcaaacttaaattcactgaccacttctacatatatgacagggacagtaggaccagggagttttatatgcataatttgattagtcaggtattattaccttgctttttaaaggtgaagacactgagactgaaaacaagtaatggcctaatccctgttttctttttcttcttgagacggagtctcgctctgtcaccgaggctggagtgcagtgacaccgtgttggctcactgcaacctccgtctcctgggttcaagcaattctcctgcctcagcctcctgagtagctgggattacaggctcccaccaccacgcctggctaagttttttttttttttttaatatttttagtagagacggggtttcaccatgttggccaggctggtcttgatctcctgacctcaggtgatccactcgcctcggcctcccaaagtgctaggattacaggcatgagccaccccgcccagctggcctaacctctgttgagagtgagtgtcagggtcaggatttgaacccatctttatctgagtccaaagctcttgaactgtatgtatgtctagtgacattgagggtggacagtcacctttctctattttgccacattaccaactaaccctttagtagttttcatagtgctttccaccaacattagctcatttaatcttcacagcagtgaagctatgcaactcactcaagtcatcaacctgaagaacccccacttattctcaaggaccatgctgagctgtcacttattaaatcacctagactgagtcgggttcctgtgtcagatgcttttactgtcacaccttgtatttgctttgtgatgcacacttcattactgtgacttaagtgtcatcctacagaaaacttcatgagagcagaaactatgttgttcttgcttgccactctattaccacccctggcccaacagtaaatatctgttgaataagtgagtttctaaaagtcacggggtggaagctggatgattctgagtggtttgcaacataatagtatttatcgcactgtaagttgagctggtcatgtgaaccatccagcaggaagcttgttaggaattccaagtcagtgactctatgtctgggagtgctagaagtgatagacatccggtctatcaccagcttctcagataggcaagtcattcttcttgcatagagaaacctggaggcatcagaggtcgggtggtgctcaggttacagtactttggcgcaggtacgggagaggtggtccctcttctgtttggaaatgtgaagcgcgtgtgtgtgtgcacgtgaacgtggtggacaaaggctacttcctcatactatacatgaaagggccataggaagataatcaaaaaggaaaagaaaggtaagagttgttgcaaaatgaattgtcttcagaggctaaatgggtaacatacatttgggggagggctgaatataagaaagagaatattgatgcaaaccacagtgaaacaccatctcatgccagttagaatggaaattaaaaagtcaggaaacaattaaaaagtcaggaaacaacagatgttgggaaggatgtggagaaataggaatgcttttatattgttggtgggagtgtaaattagttcaaccattgtggaagacagtgtggtgattcctcaaggatctagaaccagaaataccatttgacccagcaatcccactactgggcatatacccaaaggattataaatcattctactataaagacacatgcacatgtatgtttattgcagaactgttcacaatagcaaagacttggaaccaacccaaatgcccatcaatgatagactggataaagaaatgtggcacatatacaacatggaatactatgcagccataaaaaggatgagttcatgtcctttgcagggacatggatgaagctggaaaccatcattctcagcaaactaacacagatacagaaaaccaaacaccacatgttctcactcataagtgggggttgaacaatgagaacacatggacacagggaggggaacatcacacactggggcctgtcggcgggtggggggctggggtagggatagcattaggagaaatacttaatgtggatgacacgttgatgggtgcagcaaaccaccatggcatgtgtgtatacctatgtaacaaacctgcatgttctgcacatgtatcccagaacttaaggtataataaataagtaaataaatatataaataaataaaaattagaaaaagaaaaggcagagtataacagttaaaaaaaagaagagacaatgatgaagtctttagtgatctagagaatccatattcaccctaaagacatttaaattcaacatgtgaaagcaggtcactttgtagacaagacacaggcaggcacaaggctgcccgtggaattcaactttgcaattccccagaagatggagatagggaaggagcgatgacagcagagaggagaggatgtgacacaagagaaatgattcctgggcagatcgtgattcctggatgatccctatgggcttcatttcttgaattcacacagatacccttctagtcttaagacagtagtatgcagaattccacccacaatatggtattatttggtagtaattacatcatcaaattttcattctcatgcactatgtatgataggttgggactaattcagtgaaacaaggacattttcttatggcctcctgtgatatttctaaatgaaggtggctgatttttcagcttactaaattctaaacagataattggaataatactgatgtttctgggtgcttttattcacagattttcttcttccttacattaatttctgatttggcttccagagtatgtacaggccatcgtgctcctcttatctttaattaaggtctttgccatttctcttcagcagagtctgagcaggtaatgccagggtgcctgaggactctgtgggcacctcggttaatgttgggccatgctagagtcacaacgtgtgcaagagtcacttattgggccggaccttcatcttgtgtttaattatcttaaacgttgcaggctcagcctttctgtttgccatggtctgtcgggtatagagaatgttgatggagtttcctttaggtttctccaaagagccaaaagttagacccttatgaggctactgaagccaagggcttcgtggcaggactgagattccagaactggataaaaattaccctctaatccagcacttgcttttgcgaatacatccagaggcagacaattaattgaaccaattgttcagcaacatggatatttagtgggcgtgaacgcagaggatgcttacagatgaaagcttggaactgttttcttgctctgtgtgtttggggacgggtaggggaagaaacaaatgagcacagaagcctcctcctccttgagtaggataaatatggcttagactaataaaatacaagctggaatgcaccatttcctattccccaaacaggcgtcctggcagttgaaagcaaggagaggaaggaagtctttcatgagaaaggaattggggagtggaggcattggggcttcacgtggtagttctcctgattactgacacccgcctgctcctaacagcccatagagctacagccaccaactcccaaatttgtcactgtcacttcacaagtgcccggcattgttcaggaaattgtgtgtgtaaagtagagctgcctgcgcccagcttcgacaagggagcagccttgcgaaggtgcttgaaaccgaaacagaggcttatgtatcctattatgtgcctgagcaggagtcataaataattgtgacaagttttttttcccatcccacgtgacagtccttgactctgcctcctgtctcctctcccctctgcctcatagactagacttgccaggctgagtgatgatagatgttaccaggcagcaaatgacagctggatagattttttagttggtgctttagagggaatcagatatgctgtataaagcaataaaaaaagtacactcacaaggtgggttaagaatagccagcacagcagtaacccgctttgttgtgtatcaaaagttaaatctcacatggtcttagtgatgtgttaatttttcagactcctgtcagagtgacggtgaggacagtcactttaaaaaaaaatttaagaaaaggataaaagcaatcaactgttttcttagtatattttggtttttcaaatgagacaaaagcgttctctttttaaaatcatatctaagaagagaaataggattctggtgttttgccgtattgctgtattgctgtattgctgtatccttctcaatctcaaatttaaaacataaaattggagatgtgtaaggtgtggaattattcagcccctgttcaattaaataaattttttttttaacattgctcatcttcttccacacactgtattgatctagattctgtgtaacaaatggtctggtttcccagccaccttggaaatgtcatgtaggagtcaacaaaactacttagtgtattttttataaagaattacagcctcctctgaattactcagactttcatctcgggcaagccggcttggctacctcgtgtctcgatggatatgcagagctaccagaacatgattcagtgaactaccccactccctggttcacggacgtgacaggctgagacgtacttagtcatcgcatttctgtcttctcctgcactatatgggaagtggctgctgtgtaatttaagagtgctcagtatatcagatcacgactcttttcccccttgatttttctgatgaatcacgttaggaaggctgtggcttttacacggcagcgtgcagcatgaggaggcaaggcagcacaaaatgtttattaaaaaaatatgtctttcgggctaggtaccaggcaaggggggtaatttgagttacgcctctataattcaaatttggggataattcaatactggtgtagttacatttccagccacatcaagttgtacatgtattattgggtgttgtttattactttggttgtagcattctctccataggacaatttccataatgaaacctattttctatggctttatcacttaacgggttcagtgtttttctttttttccagcagacatgaattgatgagatatatgaatgcccagaaaatgtcatgaaatagttaaaagggtaggtttggagatctgctgtctaagttcaaatcccagcttgtcttcttactccttgggtgaccttgggcaagtaatttagcctctttatgcctccagtcttttaactggaaaatagggataatgataatccccccatcatagggttgttttcaggactcaatgaaataaatgtgcttagtacaatccctactaataggtattgaatacatattattttagttattataatcattatgattgagttgttataattattactgggctagtttcccccaggccacctacatctcctcacttcaggtctttccagacttgatgaccatatgttggatgggtggatggaaagttattttaggaatggagccctctttgtggttaaatgaacagtaatgttttacattggttcagagtagtctttgataaggatgcatattctgtacatcactgatactactttttggaccattttcatctcttcctcatttgaaaagaaccttcagtgaaatgctttatgtggacatggcaggtagagtacctggattcatcgatcagttctttttctgttctttctctcttgcttgccattctagctacctaggtagaccttgttggcttataaacataagtcataggcaggttctaatatgattttagaaacattaaaaaaattggactgtgattcacagtaaggaatacattttatattgtgacccagggtgcacgtgcatgcataatatatagacattttgctgaagccagtgctccatgaaacatcaattatccttcccacatgtgtgatacactttggcattttctatccttttctatttcatttgttaaaagtgatgctttaggtcaggcaaggtggctcatgcctgtaattccagcattctgggcggctgaggtggatcacttgagcccaggagttcgagaccagcctggacaacaaagtgagacccctgtctctagaaaaaaaaaatagctgggcaaggtggtgcgtgcctgtggtcccagctacatgggaggctgaggcaggaggatcacttgagccctgggcaagagaccaagactctgtcacttagaaaaaaaaaaagtgatgctttaaccagggtgagcaaactttttctataaagagccatagtagatattttcagctttgagggccatggagttcttgttgcagctactctactctgctgttgtagccacagacaaaacacaaaacaatgggcatggctgtgtttcagaaggacttgacttacagacactgaggtttaaatttcatataattttcttgtgtcacaaaatataattcttcttttgttattattaaaccattggaaagtggaaaaaccattctcagcttgcaggccacacaacaccatgcagtagccagatttgctcgatggactgcagcttgctaatccctgctttagcccacgaagctgatttttatgacttgtacttgcaacactcttctgggacatttcccaaagtgactgcgaagggacatctgtttagcagggattcaaatgggtgctaatggagagaaagcatctctcttcaagtaggttagtgacccttcagagtaaataaaaggtgcctacctcttagcagaaattctgtgactctttaacataccaccagacctgataactttctttctttcttttttttttttttgagatggagtctcactctgtcacccaggctggagtgcggtggcgcaatctcgactcactgcaacctccgcctccctggttcatgccattctcctgcctcagcctcccgagtagctgggactacaggcacccgccaccacacccagctgattttttatatttttagtagagacggggtttcaccatgttagccaggatggtctcgatctcctgaccttgtgatccacccacagcctctcaaagtgctgggatgacaggccgggtgtggtggcagacctgataactttctaagaagggtacaataaggcatactctctaactgtgtgaccacaagacgcttatttttggaaaatatctctgggtcttgagttctgaggaatgcactcagtggaactctgtctcgaagcagaagtctggggaaggccgccctgttttagtgacggcaagcattctgtgtagacatcacagtgtttgccactgagaaaggtctttggcgattattagcctcccagtgaaggaacacattttgggatctcctgtgagcacaacactgcacaaaatatatgaaaaaaatgatgagcccaatcttattcccagggagtttataggcaaatttgaacttggttacaggcaacatgtcaacaagcacaaactaacatggtctcgtttagactgaagacccaggtgttggtgatatcacagtaggtgataataatgataatatctagaagcattttctgttctctcatcatctttgcatatgtcatgtcattgattttaacaagagctatgtgatttggtggggccagtgtttaccagcccattttacaggcagagatatgaaacaatggcttcaagtcatactgttactgaggcgccaagttgaggatgcaggtcttccttagaattcctgtagtttcctctaaaaatagtggaaatactttgaaaaggaggaaaatttgcagtgggatctcgaaagagctcacagagattgatccttaagagaatctggaggatgcagaggtgtgtgtgtgtgtgtgtgtgtgtgtgtgtgttcacacgtgtgaggttgattttggaaaagacacgggtagaaataagtcctatgtaagagaagcaaagccttttgacagaaatatcagtagttgctaatttaaaagcaaccaactaaccaataaagtaaccctttaacccctaacactattagagattattccaagttagaaatcttgaattcaactttatagtacctcctagtagcaattctgaatcagcttcctgttttggaactatgggaagccccactctaaaactatttgagaaaaaaaaagtgctatgcaatcctttggcattgaggttgatattagccagcaatgcttgagaagagcaggaatggtgttcccattaaaagacaaattagggtcaggcgcggtggctcatgcctgtaatcccaacactttgggaggccgaggcagaagaatcacttgaacccagaagtttgagaccaacctgggcaacatgcagaaaccccatctctacaaaaaaatagaagaattatccaggcatggtggtacatgtctgtagtcccagctactcgggagactgacttggaaggatcacctgagcccagggaggttgaggctgcagtgagctgtgattgtgccacggcactccagcctgggcaacagagtgagaccctgtctaaaataaaataaaataaaataagataaaataaaaagacaaattaagcagtgagtctctttctgcttctgtgttttccccaagagaactttcatggaaatacttttgttttgcttgaaaaaaatactttggcagctgtgaaaaagttactgcagttcaataggatgtaaataaaagaggccctgtcaattcaaggttgtaatttgacagtgcaccattatttagacggaatattgaaacgagagtaaaaatgacttcaggtcatggtactacttccaatttaaagaaaattaaaaactgctttgaaaaactgtgctgcatatttaaaactcctatctcctagttgctgggggttagatgttccacacggcacctggaaatctgtcaatattaataggtatgatgattcttactggcatatgcttatcatctacaattttgataacagcgttgagtgaatccattgctgttttctggcgtttgcagtgtacattgaggaattaataattagtgaaagtgtagccaacttctagaattagcagtccactcagagatgcccaggtgaacaacacgctgcttccctttgtcattcaggtcccagagagattcctcctgacaactctatctacagcggccgccatcctcagtcattccttagcttgttgcttcattttatttccttcttgtttatgtgttcttttacatccttactgtccatcccctccacagtgtcagacccttgagaggacaacctgtgcatctatacccagggtcagcaaaccatggcccatgggctgtatctgcaagctaagactgctcttcacatttttattttttatttattttatttttaaatttatttctgagacaagttcttgccctattgcccaggctggagtgcagtggtgtgatgacggcttactgcagtctcaacttcccaggctgaagcaatgctcctgcctcagccttcgaagtagctgggacaacaggcatgcaccatcatgcttggctaatttttctttttttttttgtagaagtggggtcttgttatgttgcccaggctggtctcaaatttctggcctcaagcaatccttctgccttgacttcccaaagtgctgggataataagggtgagccactgcacccagtctacatttttaaatggttgaaaacaagcaatatttcatgacacatgaaaattacaaaattcaattttcagtgctcataggcaaactttattggaacaccaccagagttatgtggttatgcattgtctatggctgtttttgcacaacatacatagatagttgagtagtttcccaacatgatatggtcccaaaaagctaaaatatttagtactgtgccccttacagaaagtgttcactgaccccaccctgtgtccggcacaatgcctggtaattcataggggcccattaaatgctatggatgaactaatgaggagcagagcttggcaagagctatttccaagtgtcccttccctgctgccaataaacaagaaggaggaacagatgaacccaaattaaatactaactccaggttctcagacaatcaccaaatctaagagggcaggtggagtctgctcggaaaatttgcttaacatttctttaaaagagatgacaaggtacggtctcaggaattcatggtatctcaggttccaatttctaaaaactgagtacgttcaattttcctttggtctaatatgttttctctaccccagctcttccccacctgcttttgatgtgtaatctgactgaagactgaactctgatttttaccaccctaaactcagctgacctcccttccaaaaaatgtcagcctcttaatcctcttaataaaaaggcccatgtaactgggagaatacatttgaaatagtccacagtacaaaaagacggtctgaaaataacaaggggaaaaaaatgtactaaacgcatctgcacacacacaaagttgccagggaaacatggcaatcccttgcaaactgccagcaccgtcacatttataaagaaatgacaacaactgacctttgtctcctcttttcctgcctgccttttaccaggaacagaagagccttgtggcttgaatgatgcttttgataggcagattttcagattctgtgctgtctgcctggatgaggggtcccggtttacagctctgctgagagctagaaaatcttttatgactgtcacctccattatgacctagtctgtgcaattgaaaggtgcattttcacattggaatttggcttctatagtcctgaggagaaaaatgacatattttgttgcattatttaaatattcctgctgaacaacaaattaaaaatatccattaaaggtttatttgatatcttcctaattattgcccattgcgcatttgacaaattatttacacattttaataattgcgactttctttggaagtgacacaaaaacaattactttttcgaaattccactgtgtatatgcttttgaaactacatagccattaaaaacagtctgtcgaattaaaggttgggcaattaattaagtgcaaattctgtaaaactggaccaaggagaaaattcatcaaacctatgaaatatgacctatcttgtccaaaagacaaatatgtttaaacaaaagatgaaaattgatgacaaaattatgggtagcaaaatgcacacagagcaaatataagacagctgtacttggtttcagagtgttgggtttacccttacagaattcatgattcattaccttcaccgtcttgtaaaacttttcctagttaatctccaaagtactgtatctgggataataaaagttctcaataagagcttggaaggccattacattaatgatttgctggcctttgcgggatcccaattaaatgcaacccaagttgaggctggtagcctaagggtacgtctccctaggacagttgaaagccactttgcccatgtggctattttcttttgtttctctctttgtgccttccttacaccaattttcagtgtcgaaagtttctatttccctttatctagaaagtactctgccattattaagactttggctcttaccatgagcgacaagccctgcgtgggtttcgagtatatagcaggggacaccaaaagccagaacagcggttcacatgtgtgtatccataatgggccctagacatgtgtattacaagttctggatgttacccttaggtgctcaggttcacaaatcaacatcagccctggtgcaaagtgggcggaagagggaggtgggttcgcggactgtggggattgttaaggatacacggctgttatttccatattaaaatgtaatgatctcattaaagttaaaaccactgttaaacttgattgagtaaattacttaattaaccatagcatccagtgcattcctccagggtatacctctattcctcaagatgcagaacaaatgcaggctcagcttatagaatgttatccagggtggtatgataacactcatcttagactgacttatttcagaatctgttaaaaaattcagaatctgttaaaaaaacaatgaaaagcgagaaagtgagggtgttactcggtgttaaaggaagatgggaatagcctaccaatgaaagcagatatattttattgttaggctgacatctccgaagattttcttgattaaaaagaaaaccacctgataagcagtttgtggagcgactgctttagctggttcgacaaagcatttcctttttctcgcatattctacctttctctccttttctttgcttgaatatccaaagatatctccatggggttggcagaagctcttcgaaagctttgtttggggttgtgtttggttaagtgactctgaattggggttgcagtgagtttttgtgggtgagtgggtggatgggggaatatttaggaaacatctccaatttgcctgcccaaagcctgctttttgaaatataagggttttttgtttgtttgttttgaatgactacctgtgacacaagtggccaaccaaactgtacttgaaagaagtaagttgtcccaatttctggtgtttcttggtttttgcaaatatagcataaggataataataactgactacttcctgaggttgtcgtaatggttacgtacgtgaatatacgtaaagtgcttagaatagtgatctgttcccaggaggtattgactattattattattcctaagcataggaaagggagggggcagggatggagaatggtccagaaacaatgcagtcggaactcttggtcagcagatcacctcccagacaagctttttcttggctgctgagtccagttaaagaggccagggatccccagacacttagtagccagaaaacctgggttttgtttgatttttttttttttttaaatatgttttcctctaacccagtgtgttgcttatatcagagcctggagtggagaactgtgctggggtagggtcttgctgttgcttgcataacgtttgccatttagaaagataagtcttgcaaatcccatctgcagagggattagaactaaacttaataaagcagaagctgaacacaactggagtaaccttcttatgcctagtttaatatggtgcctttgtagatagacatcttttaaatatatttttatattttagatttttttggattaatcccaaaagaagaacttgagggatttcaaagaaaactatttatttgggaggttagggcaggaaacatagcgaaagattgagaaagtggcatagagaagggaagaaatccagtatataattttaaaactatataaacatataaaatggtttccaaaaaggaaaccaggtcaggataattattttctaaaactagtggtttagaataaaaaccagatatcaagatatctcctgaattgatactcatcacaactctaaacaaaaatgaacagtacttactgggcatttacactgtggcatagaaaagccaattctaagccactacataaactcattttaataactgtgagatggatgtagatgcttctattatatccgttgtatagatgatgaaacagacacagagaggttaataaaattgcccaagcttaccaagctaataaggggtagtgtttgaatttgaaagagtttgacttaaaagcccatattcttaccattccactagtttcaatttcactctctaaaaggggaaaaatcctcttacattaatatgccttgcttaaagatgtgactcaggagaaggcataagagacaaagaaagatagccaaatagaagcttccggcaatcatctgcccaaaggaacaccaaattaaacaactatccacacaccttcataagaaccaaacattaggtgagcaatcacagtacctggttttaacaccatgttaaggaaagaggcaccaaaaagggtgggaaagacagtcttgaatcacctacaccactcctcctacatcccgcggcagctgccctggggtgtggagagagcatctgtgcacttgggggaagaagagtgtggtgactgtgggactttgcattggaactcagtgctgccttgtcacagtggaaagcaatatggggcagaactcggccagtgtccactgaaggagcatttagaccagccctagtcacagagaaattgcccatcctagtgattagaccaaagttcaggcaatctccatgaccacagcaaaatcctccagcatactaaatgaacttgaaaggcattctaggccacaaggactgaaattcctgggcaggtcctggtgttgtgcttgtcctggagccagtgtacttgaggtgcatgtggcctactgagacaccagtgggggtggccaacagagtgcttaatcacccttcacccaaccccaggcagcacagctcatggctccaggagactccttccctctgatttaggagaggagaggggaaagtaaagaggactatgtcttggcaacttgtataccagctcagtcacagtagagtaggacactaatcagagtcctgagacccctatttcaggcatcacgaccatctaggaaaacatgaccttaccaaaggagctaaataaggtaccagtgaccaatctggggagcagaatatgtgaccttttcagacaattcaaaatagctgttttaaaaaagctcaatgaaacccaagataacacagtgaatgaattcagaatcctatcatataaatttaacaaagaaattgaaataactaagaagaatcaagcagaaattctggagcggggaaatgcaactgacatactgaagaatgcatcgaaatttccagcagcagaactgatcaaacaaaagaaagaattagtgagcttgaagacaagctatttgcaaatacatagaggagacaaaagaaaaagaatagaaaagaataaagcatgcccataagatctagaaaatagcctcaaaagggcaaatataagagttattgacattaaagaggagataaagaaagagatcagagtagaaaatttattcatgggataataacagagaacttctccagtctagagaaagatatcaatattcaagtacaagaaagttatgaaataccaagcaggtttaacccaaagaagactacctcaagacatttaataatcaaactcccaaagggcaaggataaagaaaggatcctaaaagcagcaagggaaaagaaacaaattacatatgaaggagctccaatggttctggcaacagaattttcagcggaaacctatgggctaagagacagtggcatgacatatttaaaatgctgaaggaaaaaaaaaactttagaatagtatatctggtgaaaatatccttcaaacatgaagaagaaataaagactttcccagacaaacaaaaactgagggatttcatgaacaccagacctgtcctacaagaaatgccgaagggagtttttcagccagaaagaaaatgacattcatgatcaataagaaattatctggaggcacaaaactcgttggtaatagtaaatacacagaacaacaacgaatattagaacactgtaattgtggtgtgtaaactactcatattttgagtagaaagactaaaagatgaaactatcacaaataataactacaacaacctttcaagacataggcagtttaataagatgtaaatagaaaccacaaaaagttaaaaagcaggagttgaaattaaagtgtagagtttttattagttttctttttgtttgtttgttttgcagtcagtattaagttgtcatgagttaaaagtaatgggttataagatatttacaagcctcatggtaacctcaaatcaaagaatatacaacagatacacaaaaataaaaagcaataaattaaagcatgtcaccggagaaaattaccttcactaaaatgaagacagaaaagaagaaaagatggaagagaagaccacaaaacatccagaaagcaaataagaaaatggcagagtaagttcttacctataagtaataacattgaatgtaactagactaaattcttcaatcaaaagacatagaatggctgaatggatgaaaaaaattagacccagtgatctgttgcctacaagaaacacagttcacctataaagacacacatagactgaaaataaagggatggaaaaaagttatcccatgcaaatgaaaactagaaaagaggaggagtagctatacttatattggacaagatagagttcaagagaaaaacctataaaaagagacaaaaaaggtcattacataaaagagtaaattcagcaggaggatacaacaattataaatatatatgcacccaacagtaaagctcccagatatacatgaagcaaatattatattattattagagctaaagcgagagctagactccaacacaataatatctagagacttacaccccactttcagcattgaacagatcatccagacagaaaatcaacaaagaaacattggacttaatctgcactagagaccaaatggacttaatagatattcacagtacatttcccttaacacctgcagaacacaattcttctcctcagcacatggatcattctcaaggatcgactatacattaagccccaaaacaagtcttaaaacattcaaaaattgaaatcctatcaagtgtcttgtttgaccacaatggaataaaactagaaatcaacaacaagaggaactttggaaactatacaaaaacatggaaattaaataatatgctcccgaatgaccagtgggacaatgaaaaaattaagaaggaaatttaaaaatttcttgaaataaatgaaaatagaaacacaacacatcaaaatttataggatacagcaaaagcagcactaaggggaaagtttataacaataagtgcctacatctaaaaagcaggaaaacttcaaataaacaacttaatgatacatctcaaagaaatacagaagctagagctaaccaaacttaaaattaatagaagaaaataaataataaacattggagcagaaattaaagaaaccaaaaaatacaaaagatcagtgaaagcagtggttgattttttttgaaaagataaacaaaattgacacactgtttgcctaagaaaaaagagaggagactgaaataaataaaatcagaggtgaaaaaggagaaattacaactgataacacagaaattcgaagtattattagaggctcctatgagcaactatatgccaataaattggaaaacctagaagaaatggatagattcttagacacatacaacctatgaagattaaaacgtaaagaaattcaaaatctgaacagagcaataacaagtaatgagatcgaaggcatgataagaagtctcttagcaaagataagcccaggacctgatggcttcactgttgaattttactaaacttttaaagaactaataccaattctactcaaagatttcaaaaaatagaggaggagagaatacttccaaactcattctacaaggccagtattatcttcctgccaaaaacaaaagacatcagaaaaagaaaactacagtccagtatccctgatgaggattgatgcaaaaacccacaataaaatactagcaaacagaattcaacaccacatcaaaaaaaaaaaaatcatttgttatgaccaagtgggattaatccagggatgcaaggatggctcaatatatacaattcaattaatttgattcactctatcaacaggatgaagggcaaacaccacatgatcatttcaatcgatgctaaaaaagcatttgataaaatccaacatctctttatgataaaaaccctcaaaaaactgggtatacgaggaacgtacctcaacataataatatcatactgaatggggaaaaactgaaagcttttcatctaagatctggaacacaacaaggatgcccaattttattataattattcagcaaagtactggaagtcctagctagggcaatcagataagagaaagaaataaaaggcatcaaatttgaaaataagaagttaaataatccttgcttgcagatgatataatcttatatttggaaaaacctaaagacgccaccaaaaaactattagagtggataaacaaatcagtaaagttgcaggatacaaaatcaacatacaaaatcagtagtatttctatatgccaacagcaagcaatgtgaaaaagaaattgagaaagcaatctcatttacaatagccacaaataaaataaaatacataggaagaaaacaaaaaaagtgaaagatctcaataataaaaagtataaaacattgatgaaagaaagaggataacaaaaaaatggaaatatacttcatgttttcatagattggcagaatcaatattgttaaaatgtccacactacccaaagcaatctacagattaaatgcaatctctatcaaaataccaatgactttcttcacagaaatagaaaaaaaaatcctaaaatttattgagaactacaaaagacccataatagtcaaatatatcctgagaaaaaaagaacaaaactgaagtaatcacattacctgacttccagttatcctatggagctatagtaacaaaagcagcatggtactgacataaagacacatagaccaatagaacagaatagaaaacccagaaataaatccatgcgtcttcagtgaactcatttttgacagaggtgccaagaatatacactggggtgaggacagtctcttcaataagtggtgctgtgaaaactggatatccatatgcagcagaatgaaactatacccctatctcttgccatatacaaaaaccaaataaaatgaattaaagacttaaatctaaaacctcaaactatgaaactacttaaagaaaacattgaggaaactctccaggatgttggactgggcaaagatttcttgagtaataccccacaagcacagacaaccaaagcaaaaatagacaaatgggataacatcaagttaaaaagcttctgcacagcaaaggaaatcatcaacaaagtgaaaaggcaacccacagaatggaagaaaatatttgcaaactacccatctgacgagggattaataaccagaatacataaatagctcaaacaactctgttggaaaaaatccaacgacctgatttaaaaatgagtaaaaggtctgaatagagatttctcaaaagaagtcatacaaaggataaacaggtatatgaaaaggtgctcaatatccttgatcatcagagaaatgaaaattaaaaccacaatgagatatcatctcaccccagtaaaaatggcttttatccaaaagacaggcaataacaaacgctggcaaggatgcagaggagagggaaccctcacacacagttggtgggaatgtaaattagtacaaccactatggagaacagtatggaggttcctcaaaaaactaaaaatagaactaccacatgattctgcaattccactgctgggtttatacccaaaagaaaagaaatcagtatattgaagagatacatatctgcactctcatgtttattgcaacactattcacaatagctaagctttggaagcaacccaagtgtccatcagcagatgaatggataaagaaaattgtggtacacaatggaatactattcatccataaaaaaatgaaatcctgtcaattgcaacaacatagatggaactagatgtcattatgttaagtgaaataagccaggtatagaaagacagacttagcatgttttcacttatttgtgggagataaaaaagttcaaggaattgaactaatgagatagggaatagaaatggttaccacagactgggaagggtgggaggtagttaatgagtcaaaaaatatagttagaatgagtaaaatctagtatttgatagcacagcagggggactacagttaataataatttattgtacactttaaaagagtgtagtgggattatttgtaacatacagaaacaataaatgcttgaggttatgaataccccatttaccctgatgtgattgtcatgcattctatgcctgtatcaaaatatctcatgcactccataagtatatacacctactatgtacccacaaaagttaaaaattaaaaaaaaaaagagaatgcaactcaggagtcaagtgacctgtgttttagttctagctctttaattattacatgtgtgatcactgaaaacattatttactctctctgagctttcatgttcttatccataaaatgggaacaataggagctgctgtctgcaggcaggtagtcgccttgcccgtatctccgtggctcaccttggaagtgccctgctgatcagaggacattccctatacctgctaatagcttcttacttcaagcaccaatgtctccctccttgaaggctttctctgactgtaagaggcagctcaacctgcacgtgggcaagttggcagtgctgggggtgatacccccaggagtgatctgcaaatgataagaggagctggtagataaacgtcccagcctcctcaccacccccacacccccagggaatgattctatgttccactcagtctcccagaaggtcttccgttggagtgagttccagacatccccaggggtaactagcttgttacacaccctctattggctttcctcccatcctgagtcaatttcccaatccttcactatgttcctgccctacattcccaaataaagagcttcttttcaaatccttcaagtttctcctttggggagaacccaaacaaagatgctctcaggattgtggtgagaattcaatgaaacgatgcatgtaaatagttggtgccatatctggtgtgtagcagataccgtaataaccataagttttattacctacgatgattattatgtcaatatatgaattttgactgtaatggggaagctgtaataaagagtctgactctagaagtgagacagggacacatgggtgaggaagatcaggtccagataaaatggaaagattctgtaggaaagcatatgagggtccccaaaaatcctaaggatactgctcaagacatgcctccacttcctggaatcaacaacacaaatgcccatcaatcaacgagtggataaagaaactgtgattacatatatatatatgatgcaatgctactgagccataaaaaggaatgaatgaatagcattcacagcaacctggatagaattggagactattattctaagtgaagtaactcaggaatgggaaaccagacatcttatcttctcactcataagtgggagctaagctatgatgatgcaaagacataagaatgacacagtggactttggggactcaggtggaaagggtgggaagggggtgagggataaaagaatacaaattgagttcagtgtatactgttcaggagatgggtgcaccaaaatctcacaaatcaccactcaagaacttactcatttaaccaaatatcacctgttcccccaaaacctaaggaaataaaacatttaaaaacaaagataaaagagacatttctccatttccagaatattccttgcacatgactttgttgaggggacagcagtctggtgaagttgccaggcctattgattccaaatccatgaaactggtgattatttagtgaacagcctttggccaagaggaaggagacatgtgactggcatccaaatcacagcacttatttcgtgctcctggggatgtcgttttttcttggtttctacagagatgagcattaggattttaaggatgagtaaaggggtctaaagaagtgtcatggaaaagggaaaccaaggaaaggagaagggaagaaaaacagcaaaaaagatctgaatagagatttctcaaaagaactcctacaagtgacaaggtaagtagttgctgccttgcccatatctccatggctcaccttggaagtgccctgctgttcagaggaccttccctatgcctgctaatactttaggctcattaagggagaaaatgttggctgaaggagtggctcatgcctggaatcccagcactttgggaggccaaggtggaaggattgcttgagcccagtagttccagactagtcagggcaacatggcaagacctgtttccatgaaaattaaaaatagttggcatggtggtatgcacctgtagtccaagctacttgggaggctgaggtaggaggatcacttgagcccaggaagttgaggctgcagtaagccatgatggagccactgcagtccagcctgggtgatagagcaagactctgtctgtaaataaataaataaatgaacacaaagaaaaaaaatgcattcctcagtgactgagagaagaaagagtatttattgcctttccacatattggaggaatgtgatcttcctaactgaaggttatttgaaggaacaaaatcatctccattttgaagcctgatctagttaaattgtgactggattcttgaatatattttaattctgcacaattattttggccttggttttgaaggccaaatctgaagttaacctaattatctaataaaatgcatacattaaaaaagagtcagactccgttgtttgatgtttatggacaggttttaggcctcattcatccttcctccctgtctgttccacatctggggaaactgttaagaaatcccggacaatccttcctttggtgccggtgggaagtttaaaccaggcatcacgggaaccctaatgtgggcccaccccttaaccaccatcaaagccccaagtcagtgtcctttccctgctctgtcaagaaattttggatgtgcttgaaagtctgctctgctctctccagaaagccttattatgtgagtcacaaagcttgtacgcaccctctttgtctctgtgtggtgtcatgagtcttgacatctgaaccacattttgggtcaagtctatcctgtttctgtagagtcgtcacaatagaggcaattctacgctttaccacgaaaagcaccataagattccttacagtaacaaaagcttctgggattttaaaaaaatgggtattatttatttaaggaggggtccatatggcggcggtgagagttcagggcaggggtctgaagctcaagggcagagaatgaaggaatgagtcacagagggctgccgaaggtcggggcatagatcagagacagtgagctcaccattcccttcccagcagccgaataaagagatctgggatttacgcatagcctttgcttaaaggaaagtgtacctttttgaaccttgcgacacattggaccctcatcaactcggattttaatgagaggaattagtattccaatgaacaatctacataatatcttgtaggcaaaatatttatttggggcttgggacaatgaacaggctagaaatactcatgggcaaaaatgtaacatagtcataaatgtctacattcattttccattggttgtagaaaaagaatctccgttttggtttttacaatttcagaataggctgcccaaatccagggcattgaatcagagttatataacttctctgctagcttctctatttataacagtgaagtgttggcatgtatgtgaaaatttaaagtaaagcctgcttcctcatgatcttgtgatctttaatttttacctttagtttaacaaatatttcatcatgataactttttagtggataaggagggagcattcttttcaagactgcaaaattttaatttgctttaataaaaaattctggttagtataaacatttaactgtaaatatgatgctaaaggtcaacaatactgtgcaactagttgctggaaatatgtaaaacattatatagacatcatatattaagcattatatagatttttttatttagtatgtatatttatgtatctaaaatatgggtgaaattagtatgttacaaatatattttttaaatttcaaaaatggctttaaaaccaaagattataagaggtggctcatgaagaagacttaggtgacagtttatgctcactgttaaatgtaatcattaaaaaaattattttacaaagaaaacaatcagaatcccagtatgttccgattctctatccttccttctgtggcaatggatgtctgtgttctacccacattcccccaatctcacacttctgataacatgcctatggcttcttactggaaagctgtgactctcagcagcagggctttctcttgccataagaatgttggcctttgcgtgtgagtggggttggcggataaatatttcagcttactttcccgtatataggaggctttggagttgtgttctgtactgcccccagagtcctctgtaggattcaatcccagctgccaacagcagtcacttgctcctatctatgtgccctgtagggaagtgttccatcctttgtcccctgtctcccttccttactcctttcaatatgattcctgggatcacctttcattcaaatccttgtcttggggtctgctcctgaggaaattcaaccccagacagtttccaggaatgaatttgtttggtgtccattttttttgcttctatttctctttccctctctttctccctcacttcttcactcatatatatatatatacatatatacatatgtatacacacccatatatacatatacatatgtgtgtgtgtgtgtgtgtgtgtgtgtgtatatatatatatatatatttttttttttttttttttgagacagagtctcgcttgtcatccaggcttgagtgccatggcacaacctcgactcactgcagtctccgcctcccatgttcaagtgattcttctgcctcagcctcctgagtagctgggattatagttgtgtgccacaatgttcagccaatttttgtatttttggtagagacggggtttcaccatgttggccaggctggtctccaactcctggcctcaagtgatccgcccacgttggcctcccaaagtgctgggattacaggcatgagccactgtgcccagcttcactcatgtttttaatactagctgtgtacagacactgtgaagtgttagaagctttcagtcaagtagactctactgaaggagacagaagttacagtaaatactgagtttaacttttgagaatttaactatatgcaaggttttaaaaagtgagagaaagagttatttaagtggccaacactgccattctgttcaataaatgcagaccccagctggagtgtgagaggcgaaaggaagctagaattttctcagtgaacctcaggttgcctgtgcctctcataggacatcttctcgtgttgagtggttgagtgtcatcctcgcatttaaacatccaacatcgttgtatttttcatgcaatgtggtcctgaaatacaaaccaactactttataatgtgcttaactaatggcatagtgatttttccaacacaagaagaaaaactagttgtgattgactcattgagaaacagtctgtccatctgcaccatgggactttctaaagagattttaaaatatatttttcccctacataatgtttgctccaggctctgacttttcaacctggtctcataagatatgactctactctcattacaatgcaatgtggtaagtgctttctggaaggcatatgctaatgggatattgtggggacacagagacaggaccaatgctggctgatcagatcagggaagagttctcagagcaggtaatgcttgagttggggttttaaagataagtagatatctgcctaatatttgggggaaggaaataaatgcagctcttaaaattcaaccacaaaacgttagctttgccattcttaatcctagtacacagatcctgtggcttttattttaatcagcaatatagactatctgcactatgtaagctttggggaagattagactgagatttactctatctaatgcttatttgagacatctgatatttggacaaaacaatttagtgggacttcttcctgcctgttcatttggtctccacaagatgcattaggtaatgtcaatatgtgagtctggttctctgaggggcagatgtgaaagcagggctaggcacacacaaagaggactgggggaaatgcttacaaaggaaaatggagaggaatctgagagagaagctgggtgagccatcagactgtggagtaattttgatccttgtaaagtagggaaggaaggaagggagaaaggagggaagggaggaaggaaggaaggaaggaaaaggaaagggaagggaagggaatgagggagggacgcagggagggagggaaggagggaggaaggaagggaaggagggagggagggaaggagagagggagggagggaggaaggaaggaaagggaatggaaggagggagggtggaaggaagggaagggaaggagggagggagggaaggaggaagggaaggagaaaggaagaaaaggaaggaaagacggaaggaaggtcaagtggaagcctcttagactgcactgctgctctgagaaggtttgtcaaagttgatgaaccacagttgccaggcagggaagccccatgcctttgaggagtgggcctgctttcatgtcctgttgccctcggcactggtgggagcagcttgcctatgggcagtgtggcctcttggagaacactatgatggatttcagagtgcagcctttgggtttgtcggtccatcattctccctattgtcagtgacctgagagatgaatttacatccatgcccactctaatccttatttcccaaatgtaggacacataccacagagagcacttgagattatttgagtggtagcacattgaattttttagtatgaaaattactttatcattctctttcatctgttagtgaaggagaatgagtcaggttggtgctatcattttgtagtcctcctttgaacaacaggcacacctcaggcatataaactttggcaggctacaatatctagataaaatggaataaccttgtcttattttcatgtgtatttatgatgataggtatcttacatttatatctattatggtggatggcactgtttttcaattcatactactcaaatcatttttttcttttaaaataaattgaatgatgcccatacatggcaatcaatttaataaaaatagtgagtaactaacgaacagagagcaagtggccatgggaaaatgtgaaaatgttttacaaatgagtgtctgggaactctgacctaggtcatctgaaagaagcatggtaggtccatgttgtctcaagttttcacagaaaaataccttcactgctgcactattttaagttatgccttttccttctggacagggtcactgaaaggactgtccagttttatagtgtgtctgtgattttgtggcgaagatgttgttcactctgttcctcagcctttaaacaaatccccagaggacaaatccagcttgaatttagttctagggggataaaaagtattgtctctgcacaaaggtgtatacttcttcctgtcagaaaaagacaagtagacctgtcatgatgcttgccttaccttccagaatccttaggggtgaatttactgcttttatcttcccatctattccaatctggcacctgaaagcacattgtcttcctggttccttcagagtactctgttatttaaaaagctctttaaaaatgtcagatatccctgggtccttcagctttcctacaatatccacagagactagctgaatctatctgtatcagctgagataagctagcttgtgctgtggtaccaaatgaccgccatgttgtcctgacttataaacagcaaaggttgatttcttgctcatgctctatgtctatttcaagttagctggtgggctctttaaatatcctcattgaggaaagctggtgaacagagtctttattccctggatggtggtttgttgctatggcaaggcaacaaaagaacatggcagtttattcattttcctctatagttttcaccatggaagtaacatgtcttacttttgctcacattacattggctgaagcacatcttctgaccatgctgaacttggaggaggtgggaatgcacgatttcaccattttcctgaaaggaggggaactgtaacattggtgtatagccccaaatgtcaccatattgccacacctcatattgtgggaggtcaacgaagatctccttggtatctctgaggctttctgaatcagcctttgctacagtttgcttgtctgagatcatctgttttgagccattactcttccttcctgtgaccgtcatccaatgttgctggtcttgttttaactcatattagacaacatctattgtcctttatttcccaaatgaactattaaaataatgctgctgtttgtagtagaagtttgttgcctgtttgggatggagtgaagagcaatgatagcagtgataactcagggcagaaaataaccttacattgttgagagtatccttggggtaatttgatgttttattaactggctattctgtccttggtgcctagaatagaacatgacacatagtaggagctcaattaatacttagtgaatgaaagcacttcaatatatcatcactgatcctacacattttttttagaatttcggttttcattttagattcagagggtacatgtacaggtttgttacatggctacattacatgatggtgaggtttggagtaccattgattccattacccagttagtgagcatagtttttcaacagttagtttttcaacccattatccctctgccctctagtaattcccagtgtctattgttaccatctttatatccatgagtaccctagtttagctcccacttataggtgagaacatgtggtgtttagttttctattcccaagttaatttgcttaataatgacctccagctgcatccatgttgctgcaaaggacatgatttgtttctttttaatggctgcatagtattccatggtgtatatgtaccacatttgctttagccagtctactattgatgagtatttaggttgagttcatgtctttgctattgttaatagtgctgcaatgaacatacaaatgcatgtgtctttatggtggaacaatttatagtcctttgggactatacaaacccagtaatgggttgaatggcagtactgttttcagttctttcaaaaatctccaaagtactttccacagtggctgaactaatttacattcccatcagcagtgtacaagcatttccttttctgtgcagcctcaccagcatctgttgtttgtggactttttaacgatagccatttagactggactgagatggtatctcattgtggctttaatttgcatttctcagatgagtagtgatgttgagaattttttcgtatgtttgctggttattgtgtgttttctaaaaatcctttcctaccacgtagaagttcctactgtctgtactgtctctgaactcctactctgtaaattcctagtatgttcctgtgcttccttttccatttcccttccctttaaatcatattgtttcttttcttcttcagactcttcatctcatagcctctagagttgccatcaaagagtcatcaaattcctcttttccctttatgtaaaagtatttagcccttccggtgttttactcttgacttccctactgtgacctaaagacctcagttttcacattcaaagaactctatcaggtggtttccaaggttaaaaaaagaggacttgaacatttcttaggatgaattgtgttacagctcttgaaagcaaaagtggctgcagtaagtgcttattttcaataatatttcttatctttctgtcaacatttattttaatttgaattctctgagccaaggtattttttccaaaaaaggtgcataaatcaatgaatagttcattgctttttattactgagtgatattacatttgatagagactaccatcttttttaaatctattcaccagttgatgtgtatttgagtgttttaattttttggctgtaataaataatatagccatatattttcatttccccttagaatggaattacttgattataagtgtatatatttttaactttttaagaaactgccaatatgtttcccaaagtgactgtattattttaaatttatgctagctgtgtatgaggtctccaggtgctctccgtcctcaccaacacttgctatttttggctattttaaaattttacctatttgctggcttcataggagtatctcttgtttttttaatttgcatttcgcttatctccaattatattaaaattgttaatgtgtttgttggccatttgtacacaggcatactttggagatattgttagtttagttccagtccacttcaataaagtggatattgcaataaagcaagtcacacaaattttttggtttcttagtgcatataaaggttatgtttacaccatactatagtcaagtaagtgtgcaatagcattatgtctaaaaaaggaatgtacacaacttaattaaaatactttattgctaaaaatgctagtgatcatatgagccttcagtgagtagtaacctttttgccaatgaagagtcttgccttgatgttgatgactattgactaattggacaacagtgaattttgctgcatcaattgactcttcctttcatgacaggattctctgtagcatgcaatgctgtttgatagcattttatagcattttatccacagtagaacttctttcaaaattggacttgatcctctcaggctatgctgctgctttataaactaagtttatgtaaaattctaaattctttttttgccatttcaacaattcacagcattttcaccaggagcagattccatttcaagaaaccactttttttgttcatccataaggagcaactcttcatccattcaagtttgaccatgggattgcagcaattcagtcccatcttcaggctccagttctaatctaattctcttgctcttgttaccacatctgcaattatttctcccactgaggtcttgaacccctaaaagtcatccatgaaggttgaaataaacttttctaattttcagctattcaatttactttgtccaggttcttcagagaaatcactatagcaaccatagccttccaaaatatatttcttaaataataagacttgaaagtcaaaattaatccatgagctacagaatggatgttgtgttagcagccatgaaaacaacattactttccttgtacatcttcattagggctcttgggtgatcagatacattgtcaatgagcagtaatattttgaaaagaatatttttttccttggcagtaggtctcaatagtgggcttaaaatattcagtaaaccatgttgtaagcagatgggcttgccattcaggctttgtccacttatagatcatagacagagtagatttagcataattcttaaggactccatgattttcacaatggtaaatgagcattggctttaacttcaagtcaccagctggattactgctaacaaaagagccagcctgtgcttttgaagctttgaagtcaggcattgagttctcctctctagctatgagagtcctctatggcatcttctttcactttgaggctgttttgttctcatcgaaaatctgttgttttatatataagtaccttcatcaattaacttagcaatattttctggataaccagttgcagtttctacatcagcatttgctgcttcatcttgcacttgtatgttatagagacaatttctttctttaaacctcatcaaccagcctttactggcttccaacttttcttctgcagcttcacctctctaggccttcctagacttgaagagagttaaagggtcttgatttggattaggctgcagcttaaaggaacgtggtggctaatctgatcttctgttcaaagaactaaaactttcttcatatcatcaataaggctgtgctgcttttttattatttgtggactcattggagtagcacttttaatttccttcaagaacttttcctttgtattcacagtttggctgttttgcacaagaggtctagctttcagcctatcttggctttcgacttgccttcctcactaagcatcatcatttctagcttttgatttaaagtgagagacatgtaactcttactttcacttgaacacttagagaccattgtgggtgattaattggcttaatgtcatgttgtgtctcaagaagtagggaggcccgaagagagggagaaagatgggggaatggcctgttggtgagctagttagaacacacaacatttatttattaagtttgcatccttatatggacatggtttgtggaaacccaaaacaattacaatagtaacatcaagatcactgattgcagatcatcttaatagaaataataatgataaaaagtttgaaatattgcaagcattaccaaaatgtgacacagagacacaaagtgagcacatactgttggaaaaatggtgctaacagatttgctccaaggatgcagggttgccacaaaccttcaatttgtaaaattgcagtatctgcaaagtacaataaaataaagcatgataaaacaaggtatgcatatgtatacatatatattcacttttgcaaagggtctcttaaaatgtttcacctatttttttgttggtttgtttgccttattgtcaaagcattgtttatatattctggatagaagtcctttgtaagctgtataattttcaagtagttttctttcatactttgttatttactttcttagggtttgatttctttcttcttgttctcacttcttatgatgaaattttagataattgatcttagacctttcttctttttgaaggtaagcatgatggctgtaaattcccctctaagttccgttttagcagaatctcacaaattttgacatgttgtactgttactattaatttgtaatttaactctactgtgatcagaggacatactttgcatgatttcagttcttttaaatttattgagactttaacaaaatagactctatcttttttagaatggttttagatttatagaattgagatgataatacagagttctcatataccctgtagctagtttcctctctttattaacattgtacattagtatgatataattgttaccattaataaatgaatattgatatattattattaactaaagtctgcagtttattaagaacattagtttttacctaatgccctttttttctgttccaatattctgtccaggatggtatattacatcatgtgctagcctaggagtcactaggtccaccagactcctcttggctgcaccagtttctcagactttcctattttgatgacctgaaagttttgtgtttttatttatttatttattagacagagtctcattctgttgtccaggctagagtgcactgatgtgttctcagatcactgcaacctccgcctcctaggttcaagtgattctcgtgcctcagcctcctgagtagctgggattataggcacctgccaccatgcccaggtaatttttgtatttttagtagatacagggtttcaccatgttggccaggctggtctagcactcctggcctcaaatgattcacctgccttggcctcccaaagtgctgggattacaggcgtgagccaccatgcctggcctgatgacctaaaagttttgaggagtactggtcaggtattttgtaggatgcccctatattaggagttgtctgatgtttttctcataagactggggttatggttactgggaagaagatgacagtgataaagtattcttttcacattatgtcaaaggtatatgatatcaacataatttatgacttaaatcatgatttatccacatgatgttgaccctgctcacctagctgaggtagtgtttgtcaggtttttccactgtaaatgtcttcttttgtccctgtatcatactctttggaaataagtcactatgcagagcctacatctaaggagtggggagctagtttttctggtataaaattcttggttaacagattcccccccgccaatcccctcaacccttcagtactttcaacatgtcattacaatgtcttctgacctccattgtttctgatgggaaattagtagttgacctcatctttgttcctctatgtaacgtgtttttctcttgctattttcaaaaaaatttattttgtaggttttggagaacttttttaagtacagaaagtgttttcttgcttcaggaagtggatgttcctgtcccactggtggtaaagagtaatgataataacaatcaacatgatgtaatccctcagtcacatttagaagtatcagccagacaagtgttaagtactaacagttgctaagtgatgctgtggttttaattggatcactcaataatttggttgagttctttagaacagaataatagaaaaaaattctattaaagaaaagtaggagaaaggtagaagaatggcagttctgagttctcacacctccaggatccatcccttctcccttcacttcctgagtaattctgttagctttttgtagaagtttgcttgatctttcacttcagtgtctggtttctggtctcttataagctgttgtaaccttgacactacagaaggcttcaccattgtgtagaaagtgtcctatgaagaaagaaaattctgtaattttgagaataattttgttgccaattcaaacccattgttgtgattttcttgttgtataaaatgtctgtatctgtgtcagatcccctaatccctagagacatcaggggcagcatcttgggaacattttggtgggaatgcagttggatagcaagagaattctattagtattcaagctctgatgggaggtaaagaataaaaaaaaactaatactgattgagaacctaccatatgtcaggtggcatactttgctttttgtgtaatccttacaacaattcttcaaggtaggtattaatacacccaacttacccttgatattattctcggagaagtttaaacttcttttctctttttttattcaactgattttggcttcttagctaggttgcgattggcaatgtagaagattatctcatggtttgaaccctaggtgtctattattcctctgaccacagttttgttcagtaatgacccaggacatttgtcccaatttttgaaagaagagttgaaagaagtttattttcctgctgcatttgaacctgtgaggatattaccatgtggctgctgatagttatcttaccgttacatgaaatttgaggaagaaatcatggctgagagcacagagaaagaaagagttaggtctgggtgaaatagtttaactcctgaattaacggatccctgaagcaagattcatctgtactttttagttacatgagtcactaaattctcctttgcttaagtcagtatgagtagggttttctgccttttataactgaaatggtcctgactgatatgaccttttttgttcctccattgagcacatctcagcaaagccttctttggaaagggaattatactaaattaatgtaatattctttgattctttgatcctacagcttgaggactaagtgtccttgggtcagtcctgatctctttctgaggtttggttttcctttttgaggaatgtattcatttccatgtaagtggattgtattatatctctaattacgcttcttagtgtaaaattatctggttttaggaaatccttatttcagactaaaatgtgaatgactctaagatttaatagaatctacgagcttgagttttgaagttacagacacatacatttgaaagctgactctgccacttaccagttatataaccaaaagtaaatttctttatctgtttacatttcaatattcctaattataaaggggacataattcatagggtggttgcaaggattaaatgacatcaggtatatggaatcatatgtggtaagcactcaatacctgatagctatcatcatttattactccttcctagtgacatccttatacgaaaataggatttccaaaggtgtgtttggtggaaaacagtcctgcaaaatgccctcacaaaaggatttcggagtcaaatacatttaggaaatgcttatgtttaatcttcccgtattttcaagatatattaacatattaaaggcgctaaaaattcttcagtaaataaatatgcttaaagttgttgatccagcatccaaaatatatttgactacacaatgcttttttccttcatagatgtatacctattaacatatattgacaaaaatagttaaaacccttaaggggtgattttaggcatccatcagttgggttgaagcagtggaagggagaatttctggggggagttcaagtctcagatatgagctcctgtaagctcctactagaaaattgggctttatccaaaatttagcctagatcagccattggcaaactctggcttgtgggctagccacttgtttttgtaaataaagcttcattaaaacacttatgtgcattcatttatgcattgtctggcttatgggctagccacttgtttttgtaaataaagctttattagaacagttatgtgcattcatttatgcatcgtctatagttgctttaatgctgcaagagcagagttgagtggtagtggcagagactacagcctgcagagcctaaaatatttactatctggcccttttcagacaacgtttgttggcccgtggcctaatgacaaggttgcatctgtaagaactgcatgaactcaaagtagatttcttttttggtccgtcttagtaagttcttgttattccagctcataaagtgagatgctatctccttatattagtaatcctgacttcagaaaaatatcaaaagaacccgataactattttactcaaagggagtagaagaagagagaaactccctgaaaagataggaatttatagctcatggaactgaattgctcttcagtgactttgcccttaaatctgaacacatagcagttgctcacttccttaggaagctttcccacatcgacaccatatagtactgagttgtcctgtggaataaatgacattattataagctactactatatctttcacgatgtctcctaagtttcacggtaattcctgttgagttacttttcgggtagcagtgccactgagggcgacaataaacaaaatttcttcactgaagtgattaaaaacagcctcctttaggctccatgggtttggatccatggctgttatcacatcagtggctctcaggaaaatgaataagacttctgaaaagagacaccaagttttttatttgtatcacatcataaagtggaccatgttaactccctggctaaaatttctctctttcaatttttggaagacaggaataagctgtgccttatcatacaaactaggagtctttggtctcacagcagatttacttgtggtggcagaagttcattttgagctctgagttttaagtctccattcactcattcgttcaacaatgtactgagaacctattcatactttatgccacacactaactgtgcagcagagtaagcaaattagataagatccttgccttcatggagatggaaagtctaattggagagatacatgatcaaaaagtactcagatagctagacaaccataacctgtgatacatgctctgcaagaatgaaaagatgcaggcgtgacaggagacatcatttagatagagaggaggacttgtggtgttgtgtgtaagggtatcacctgaatcctaaaaagtgtgatggagccaggtctacctggaagaagaggaaactttccaggtagagggagcagcatgacaggaaggcttttaatctggtggctacatttggaaaaagacctcagtccctggattcagaccttgatacattcttaaattagtttaatttcaagtaacttcaccattcttggtcctaaactttccatctcttaaatggcaagaacaacttctacatgagtggtttataaaaaaccatggagaatcttgctaatattttgattagaattgatgggagaaaatagctttcatgttaacatcagctcatttgttaaaatcttggttatagatgccagatgaaatcttagcggtcactcaagcatttcgtaaagaagtatttgtaaaggggtaggatgaagcagagtctgaatagaattagaatttgaattccatttcacatttttgtaatgtcagtcaaatatgacaaatctgaaataatatcactttcttctaacctgccaactggaagaaaaattcccagtgatatttatgtgatttattgtgagttaaaaataaaaacagataaaatgaaatgaaattcttttattaagcaatttgccccaaacccaactgtactaattaagtctccatggataaatatattcataaatagtcatgttttatcaaagtcaaatacagggcaaacgcttacgttcatgcactactaagcctgagttattaaataaaatctgtgccatactctttaaattaagattctatccattaataaatgtttaataaaaatgtaaagatggaatattgtttgaagaagaaaaacatccccagtacttccagttgaatccagcttagtgaaatgcaaattttataaattccaatctatcaaatagaaattttactataaaaggttttcatggaaataatagctgtcaactatcaattaatgcacacagtcccattttccttaagtactgtattgaactttaatgaaaggttacttattctatcaaattgctttatacttcgtaccattaaacttaaccaaaaattaacatcagtattccatgaagagaacatgcaaacaaaattcaccaaaatgacaggggagcctaaatgtttttgttgcacactgagaaatatgcttccacacacattttaaaaacgcaaagaattcatttttaaaaccgatgctatcagaaaatttaacccattctcaactgcatgtctctcttatatttctttgcctccttacattgagccatgtatgatatacaaacaatatttttaattatgtcaatagggcaaaagcttaactcggcagaagccagccagcatggcatacagtagcaggaccaaggacttgaagccaacatatccaggttcaaattcaagctgtcattaactagctgtgtaaccctgggctagttgcttagtcctcctgaggcttaaattcttcatctgtaacatgagaacaataaactgatctttgaggactgctttgggtacttaggagaaaggtgtatgggtaagcttggaacataggaggtgtccagtaagtggtagctgtacttaatgatttacaggggttaggtaaggatatcaataaacgaaagcagaaagtcactgcccgtgcaaattagaggtgcatatagatgggaaggtcttaatgcatttttatagttttgtaaaatcactcttatttagttcttatagaagcaataacgtacatgtgctgtaatgaagagtgatcgatcataatactaatgacccaggcatgccctatgccctttgaaaaccccctaaacactggattaaaatttttcctcctaaaaccatatgcatatcaatatgaaatggcattgagtgatgctaaataaataaataaatatggtagagtcaggagatttgggttcttatcccagctctcactctagcggaacacatgtccttgaatagcccttcctcctttccagacatcagtttcctcatctgtcagatgagcagtgggcaggtctaagtgggcacgagtaaatactagggagaggtaggagctatggccaaatggagagcatgtattctttctttccatagggacatcctctcctcagttccagctgactgttgccttgctggaccctggaccccgtattgctagatctgtaagaaaagtcagaaattcagatgttgaaaacaattaaaaacaattattaaaaaactgtgctattcaagaaaatcctgtctcctggaagacttcacatttgtgggctgcctgtttagaactttggactagatattttctgaaagccctgaccggatctgcagttttgtaattttagggaaatctcttttttgtctgattttctacactgtaatcctgaaaaatgatttacaaaacccaaatagattttggcatgaactaagcttaaattaactgctctctatcgtgaattaatattaagcagagcttggcagacactaaatatttgttttaggaatacacacagcttccactttcatctgggttaagcgctaatctttggcctgtcagttgcaggatatagcactggataaatcatgctctcttgaacagatagatgccagggtggttgtatacaaatggaacaatgtgtcaatgaacacccgagtttgggttacatctactataaacatcgacattcctttgcagtgagcccatttgctggttaagcagttacagcttcgcaaggtttgatgcgcctgtgcccaatcacggtgtaatgatttcagatgtttgcaattaatgaaccattagattaattggcagagtatcataagaaaggtgttaagaattgggtcaaaaccacagacaagctatcacccacagggacagcaatcaccagaggcaaaaaggtgagaaaatgaattaatgattttatttaccgcttctcacccctccctccacacactttctttctctgtaaaacattagcattgaccagcgtctaagttcgccaaacacagaaaggaaggagaaagctgaaaggaaaaagaaaatatgttttcatattcctacagttaagacttgatctttggaaagctgggagttccattggtaccaaaaagtgacaccatttctcagtgtatgtccaaatctctctctgtgggcttttttcctaagctcttatgttttattaattatgtaacacatcaaccatcttagaaaaatgattaatagtacttcagaaacatggaaataaataagccaagcttcaatatatgattatgtaggcttgatataaaccccagggtagccatcttttaagatgtgaggagtttaacaccaagctgtcgctacagtacttaaaatctggcagcatagtgagttattgcctggcagtggatggtgcttcagatgaatatgtaatttggaaagttaaattaaccctgaaatattttatttgttgtctattttccactcaggaaagagatcttcatgtaaacagagtccctcttattggctgaagtgaagagtcattctgaggtgagctaagcccagatacttggtaaatttatggtggctgttattttcataacaaagaaagtcaatttttggaaaaggatactaccatgacacacacaaaaaataattttcaaataaaatcctggtgcttcctccatagtgtgtgttgttaccggatattttgtttggcatttatttacttataggttcatttctgtctccccactacgatgtaagctccaggggaccagaaacttggtcatttagtttatggttctacccccactgactaagatcctggcacacagcaggtgctcaataaatacttgttgagtgaatgcagaaatgagttgttgttgtcaaaagaaaatggctttggaattctgtgttgtcctgggggaatactgatgggtccaggcagtgaccttactgctcttggacaggctcatttattggtttattcaaccaatctttattgaagacctactatgtgccaggccctgtcctaggcactgcagattcagcagttaacaacgcatagttccctaacctcacagaacttactttcttatgaggaaagcagaaatcaaacacatgcttacacaaaggatcaatttcattaaaacttggttactctcttgaagaaaaaagtatagagccataagaatatgtgatatgggagcctcatctagcttggggagactaggaagccttcccagggaaagtcacacttaacctgagaccttagagattaataggagagtatctggagcagagggaaagcatgtgcaaaggtcctggggaaggagcagcttcatgtttgaaatacagcaagcaaccagtgtggctgcagaagagagagtggggaggacagtgagaagcaagatgcaaagaaagtttcaggtcacagatcccattactgggtatatacccaaaggattataaatcatgctactataaagacacatgcacatgtatgtttattacggcagtattcacaatagcaaaggcttgaaaccaacccaaatgtccatcaatgacagactggactaagaaaatgtggcacatatacaccatggaatactatgtagccataaaaaagatgagttcatgtcctttgcagggacatggatgaagctggaaaccatcattctaagcaaactatcacaaggacagaaaaccaaacaccacatgttctcactagtaggtgggagttgaacaacggacaaagggcggggaacatcacacaccggggcctgtcagggggtagggggttgggggagggatagcattaggagaaatacctaatgtaaatgacaagttgatgggtacagcaaaccaacatggcacatgcatacctatgtaacaaatctgcacgttgtgcacatgtaccctagaacttaaagtgtaataaaaaaaaaaaaagaaaaaagtttcgagtcaaattactagatctgtgaaggcccgtttctgcccttatcctgaaagaaatgaggtgtcattgaagtgttccaaataagataggaaagtcatcaaattttaatttttaaaattttattgaaattaattagaaataaaattatgtttacacagtgagaggagtacgtctttagctttccttggattctcttaaaagaaggaagttgactcatactcttaaagtggggtaaattagtaatgagctggtggttggaggcaaaagggcttacctccaattatctgtgtgttaatccagtcctattccagggacatttttgtctgcaatcctcagagattttatgagattgactggttttgttttgaattaaataagaaattgctaaagtgccagttgttcaaaatgtgtttttcccctttgctaagtttgcatggatagttactggcaaacataccacgagtacctcctatgcatcacgccttagttgtcagggctagaaatgacgtagatgtattctccgtaagccgtataaatgctgctcaaccaagtgtttcataaatggctgaatgacaaacagggtgttccccatcaggagtggatatgtaaatatcacaacctggcccttgttagaagaggtatataaaaaagaaagtgctgtggaagaaaccaatcctttttgggcataaaaagaatgagagatcagagaagggacatttgatttgggctttgaagaataaattggaatttctgagcaaagagtataacataaacaatggtcaacatgcctaactgctcaaagtttagttattgtgtgatttaagagtatagtaactcatatttaatggtgtatttcagtagacttaaaacttagccttaaccaaagcaacaagagctatgaaaacatgcatgttcatttctttaaatgtgtattagaaaacaaactaaaattagcacacgaacccatgttttcatagctcttgttgcttaaggctaagtttttttaaaaggtttgtttctaatgcacatttaaagaaatgaacatcctatagcttgcctatccaatgtccattttcccccttcctcttctaacagaaccccaatgtatgaggttacccacccatcctccatgcaatcttgtgcttcaaggaaagctgaccccattcccacctcaagtaaatagaacttactaagacaggtatcagaatcttgttttcctttccagtgattggctcaggagaggtcatatgatccagctctggccaatgagaagtaaggaaagatctgcccagggatttctgggaaaagttttctccttaaggagacaccagagaggacttttctgcattctgtagctgcagtagctcatcttcccaccaggaaaagagctagcttgcaggtgatgctagtacattaatgatggcagaatggacacgtggaaagaatcttgatgttgatgaatcacagacctattcccttaaacgactgtagagagttgctctgcctctggacttcttactctatgaaagaaagtaaagggccagagagttaatattttaggctttacagcccaagaggcaaaatcaagggtattatgttggtatttatataacaacagggaaaacaaattttgtccaattttttactgatgaaattcaaaatttaatgagagtgtaatttttgtaataaaggtttattaataaaaaagggattattttctttttagtgctcactatcaccaaactgaaaatactcatatgtaaaaactattcttgattggcagaccatatagaaacaggcaatgggccagaattcacttgtaggctatcgtttgccatgccctgttttaaagtaatttttattttaaactttttattggttgaaaattactgttcccaaataatatctactattcatagccatggtcatcataattgatacacattaaacattaaaaaattctctatgaatcacctctagctgtcttatatccataaaagggatgattaaaagattttgggaaataatagtttacttttgctaaatacttttgtgccaattactggattctaaaattatgtgcatgagctaatttaatctttacaaaaatccatcaggtaggcagtattatcattattttgaagatgaggatattatgtcacagagcacttagatggttctctgttaaagtgagattggttattgtctctctactactgtgctgttcaactctgatctttccctatttatgtgcaaatgaaccatatatataaacttgtttctgattcgaacttcctaaactaactggcacattgcagggaagtcagttatggaaacagatgatgcagctttaaaaaaaattatcattacatttctttatggctaaagagcatctggaacaatttaagaaattagaaggagaataagatgttttacaacataatatgccccaggattgccatacaagtgggaaatgtgttagttgaattatggctccgtgctttccttttgtggtatgctttatccagatctctgacattacggtactgaggttggctctttatttagttagttttgaaaaatgttctttaattctagcattccagggaataaagtagcactccaaataataatgcacgctcaagatggagaaatcagacccttcgtggggagagaacaaaaattaaaatgtgaatcattaaaaagcaaaacaaataaataaataagactgtaaatagacccctataattatatatcgcacaagaaaagccaactccagatggttcggtaatctcatcaccagcctcactaataatcattgtaacattcttggtctctcccttaagataatgagcaatatgcactaaaaaaaaaaaaggtgtaaacatgaactacaatttctcatctaaatacaaaacaaaatagaatgactcaccttaaggtctgctagtgtagagtgttttaatctataatctttcccttcctttaaaaggttaaccaatggggaaatacaaccaaattatgaaagttgcctttctaagtagacaatatgtttccccccgacttcctccaagggtggtcccttctgaaatgaacccagaaaattaatgctccaataattaagcaaatttaaagactatgattagtaaacaactttgtcacccttaaagctgtaccactgctaacattttttaaagtttcctaaggccctttcaccttagaaaatgatcgttactagttgagccaagaaacagtatagcatatagcgcttgttattatttttctccatacctgctgttccttctctagaatttattttgaaggaccaaaaaaaaaaaagaaaaaaatcttcattgatggggaagaaaggaccaaaagaacattatgcaaaacagatgtaaaaccatctctataatattgcatgctactattgagcctttatttctgtcttttttgccttgcaaggcagttctgccccagactcataactttgtttcctctcaattaaggttgttcaatataaaattggatcatctcaaacatacctaccgggatgtagaaagaaagataagtttagattttttttaatatgatgttttatctgttggagtgggttaaattgcaatactctttgagcacattctgttttcctgctccttcaggaaatcatctgtggctctgcttcttgggtaatgtagcctacttcattgaaaaaaagagtaactcagttttgttgcttatacatgggcttctggactgcttatgtgtttgtgtatcacacactcaattcaagggctccctttgactttctgcactgagcagagcaatttcattcaaattttcattcaaaattcaatgtcgtcatcagccacccaaatgcaaggatgtgatttagggatgagtgatgtcagttatgaagatttcaaagtctatttaaaattttcaagaatgctctgcattccaatcacacacactctagtctaagaagttctggccattcctgtcatgtcatctggtggatttttaataataaaatcccttatctttctgcccaaggatctgacctatttaggagcttctggactattttcatctagtcccttggctcatcagttgattcagtaaatacatattgagtacttgcaatatccaaggcactgttctaggatctggggacacaatgtccaagactgacaagacgccgtgaaactggcagtttagtgggagttgccaggagaagaagctctccaaagcccatgcaagtgaaaggtattgtattgaaaagtgataggaagccatcattggaaatggtaattcctcatggtatttggggccagaaactgctattctgttaggtataaacccactctttagtgttctctagggccatgttgtttttggacttctccttttaatatgtgtctgctgcagtatttttcttctttctgaagatcagcatttttttgattcttctatcaagtgtatacttggcagaaaacatcccctccagccttgacttgatgtgaccgtgtagttcttgagctcagtgccatctgactcttaagacgacattcttgagggagaatcagatgggttgctgttgagtcagtggaccccgccctcctgtgctagctgtttgttattggtgccacgtgctgccatctgtgaagtcgagtcacacaccacagacatggctgccagagaccaaggcgggaggatgtttgcagggaaggcggcctgagaaacactcccaagtgcacctgcaaccggaggactgttcatctgcagctccaaatgcattgtacaggcacaggctcactcttcccctttttctcacagttgtttagattgtggtatgttgtggaaaacagatatgctgagcttctggctctgtggtttccaggattgaggagacataagtagggaagttggcctttccttctgtcttgcattttattatatttcattttaaggggggcatttctaaaaaatattaactttctcatattacaaaagtaatatgtattcattgtgggaaacctggaaaacagaaaaagtagtgaagaaaagaatactctctcacattctcacttctcacagataactgctattaatattgtatgcccaggccgggcactgtggctcacgcctgtaatcccagcactttgggaggccgaggcaggtggatcatgggatcacgagttcaagatcagcctggccaatgtggtgaaaccccatttctactaaaaaaaatataaaaaataaaaaatttgctgagcgtggtggcacatgcctctagtctcagctgttcgggaggctgaggcaggagaatcacttgaatccgggaggtggaggttgcagtgagccaagatcatgtcactgcaccccagtctgggcgacagagtgagactctgtcttggaaaataaaataatgtatgcccacacttgtttgtgcaacaaaaatggaaccttactcaatattctcaaaataaaagtatctttaccttaatacccatatgctctgtgcccattatgtgagttcacccaataaagaaatgtaagaagcagaaaatgaaaattttctcagaaatttcacctcttcagagagagtcgttgattacagtttggcataaatccttccagatttttaagataggtgtgtgtgagtatatacttttccatacaaatatcaatactctttcatgtcttttacagcttcagcatagtattgtattgaatgaatgtattgtaatgcaattaaaattctctttcagtggacattcagggagtttccagttttttctttataattataaatcaattttgcatagctgtccaaatatttccttaagatatactgctatctgtgggccaaaagttgccatttctagccaagtaggagggagaccatattgagtaattaagtatccaagatatatataaaaataaaagaaaacaaccaaaaaaatcaagacccttaatatctggaagttctgtgggagaattagaataaaaaatgggcacagtagctcatgcctgtaatcccagcactttgggaggctgaggtgggaggatcaattgcagacagttcaagaccagtctgggcaacacagtgagatcgtgtctctacaaaatctctacagaacgtttaacaaattagctgggtgtggtggtgtgcacctatggcctcagcttcctgggaggctgaggcaggaggatcatttgagcccaggagtttggggctgcagtgagctacaaacatgtcactgtactgcagcctgggtgacacagtgagatcctgtcttggataaaaaaaaatgtaagagtgccagaaaatgataaaaacaaaattaaaaaaatgtaacccaaaactttttttttcgttaaaggaggatctgaaaatgtagaggtgagacgctaatggcagagtggcctcagctttcaccaggttttgaaaacatctgtgagggaggcaccaaattcactgtcctgcagctttgacttcccaatcctcgttgcctcgtgctgccagcctgtatgctggtagaagtgtgttcctgggaacatcctggcatcttgtgttaggactacactggtgcatgggacagatcacgctcaagaaggtcgatgtaatttgaaaaacagatgggctctgctttgtgaaaactccaagcatatgaagtctaacttgaataaaaggtacatgtttggaaggagagtgtttgttataaaaggactgttcaccattggggtgtataaatggaagtgctcttttagccaggcagatccttaacctgtctaaaagagtatttgattttaaagtcccttgaactaggtctattgcatatattttcaaatataccactttggctgggagtaatatttagccacaaatattctctcagcaagaaaaatggaggataaaatgttatatatgttggtgtctttttcccatctagtttctatttcttacttgaatcatcttaaaacaactaagaaagttataatcagaactaggtccaaatttgtcgtcctagtttgtttttgtgactttgtctaaaagctgagcaaaatctgctcaacaagggtcttggaaacattgttacttgtgttttccatccatcactcctgttcatctgcatatacctgaacagaattattcctagcgcattgaatctatataccctctcttagtctctgttcattatagtaagctccagaaaaaataatataaaagaaatattaaagaaagaaaagaagggcaaagaaaaaagttctgctggttaagaaatcccttttagccagcggggcgccagaagaatccagggacatcaatagttcctgaactgctaaagtatttcctactcttgtgaattctaaacatctctgaagtccaatatagatcccaaatatactgataggattagaaatagcatttccaataaaaaatgcataacacagtaggacatgaaataaggtatttctctttgaaaccatgaaattgcaccatatttgtctggaaatgtgtacatgaaatttaaacaacccttgaagacatccatctattttttttttgagtttgctcctcaattgaaattccactctctggaagtttgtgctgcgggctcccaacttcactctctgcctctcctctgtttccctccatttccttccctttatgacccttttcagttgcgcccccttgatttatggtcatttgtgtgattgcactgctttggtttatggcagtttatgtcatcctggtcttgtcataaatgactaccataaagtgaggtaaaatatcataaaacattagtgagtccctgctactcaaggttcttcagaataaaccctgacaggtaccagctatagaaaaatagatctggccatttgaaaggtgcagtatttgtaataataatcataataatgatagttaaaaataagttactaaagtttgctgaactctatgtgccagtcactgggttaagtttatttcatacattatgacatagaatccttgttactgccctctatggcaaaaactaggattatcaccgttgtatagatgaggaaaccgaggcagggagaagttcagcatggccagtactcagtacagtccacagtcttactgtgtcttaagagctcgtgcttttaactgttgttggtctagatgctgcagctcgtgctgtgtgcacataaggggttgagtggattgaaatgtgggtttagcatttggcagacagttttcatgactgaggagctcttgtcaccttcaggccttttttgctctccttcccctcccagttcacagagccttctggcacaccctgctaccctggcagcactgcctgcctttgttacctcaccatgccctctagaccacaagttatctgcaaagttgtctttcttgattcatccagctcacttctgaccttgtcctttggaatctcagctgtgctagcacatctttgagccagaagcctgagagtcacctttgattccttctctttctaactagcaagtcctgcctgtgccacctctaagaggcatcttacacccatctgcatttcactttaccttccagaaggtgggtactgtaagccactgccatctctttcctgcactgctagagatcaggctctgcaaatgctcccagccacctgtcctttgggctctatgcaggagcagaagcacttataagcacgagctgggactgccattgacagccctcatttatccctgtggttcgcttccttttgtgctttctctgactcctgcctccctcatgacattttgtcgtgctgttgtctccgcctcactggcctcccccgaaccaggtgaattattttctaacttagaaacttcacaccataaactttgctctctgcctggaacttgcagcccttaactttcctgtacccattcttgtctttacggagtcaatttgcttatcattgttcctgcctgaagtttctccctctttcttcagttctctactactgcaactctttccttcctagatctgcccatatatactgaggagtgatttgtttatgtattgatgatctgtttccctatctagattgtaagctccatggggacaggaacacaactatcacgtccatagccacattcctagcattcgtcacagggcccagcacaacagcatgggacatatttgtggggtgggtttagatgggattgcaggttatatctccacgtctaaactggatcgtgagggctaaaaggacagccatgcatcatctgtttctgtgaaatatgttgtaccaagagcattcacattgtaggaacaaagtggatgttaatgtgatacatagctgttgactgaattatagtagccctcacaaaaccttggctcctaggattaagacagtgcattgcattggattgggcattggagactggccatggggtgtataaaaaggggaaatggatcataagacaagttaggacaacagtttctatgatccaataaattcattgaaagaaatatgtgagcatcttggttaaaaaagaaaaagagaagaaaaaaggaaccaggaggaaaaatggaatcagtgtatttctctctcttttttttttttgccccctcatctcctgtcttttccaaaaatctttctaggtttcctctgtcacatccgtatgaagtgtaaattatagtttccaatataaatggccattttcagcaaattttagcaaggaacaaaatttcatttgagactgaaatttggcatccctttgcctcttcatgctgggaactattttttgtctttacaaaatgcaatgagacataaatctttttgcttttatttctaaatgatactacaccaagccgaaaatgcactgggaaaataggaatgcctccaagctcgggccagcctttgcaatcctaattcatagtgcgtgctgttataccagggagaaatcagatcagggtcctataaaaatgtgaggctatttttaattgtatgtactcacttccaatcccattcctctccctgcaaatttcgttttaccctggcactcctaactaactacattgccacccacaaagaagcctggtacactcaacagctaacacttgatttgacaccatttaggaggctggcaactccaaaagcatatggaatattccagatggattcccagggacatttggctccaggtttctcatgttggggaacacagttggcacatggagcaggccagttctttattgcatcccatccgaggcaagatgttggttgtccctagacccctgacattacatgccagttgatgcctcccagtcactgtgacaagtaaaagtacacctcccccagttctgaatgtaacctttgggggacccgattcactttggctgagaaccaccaggaggatttaaaactttttgcacaaaaattaacagggcatggttgggcatgcctgtaatcccagctactcgggaggctgaggcaggataattgcttgaacctgggaggcagaggttgcagtgagccaagatcgtgccactgcactccagcctgggtgacagagcaagagtctgtcttcaataaatgagtggggttccaagatggccgaataggaacagctctagtctacagctcccagcatgagcgaggcagaagatgggtgatttctgcatttccaactatggtaccgggttcatctcactgaggcttgccagacagtggctgcaggacagtgtgtgcagcccacggagtgtgagccaaagcagggcaaggcatcgccttacctgggaagcacaaggggttgaggaattccctttcctaggcaagggaagccatgacagacctggaaaatcaggtcactcccacccttatactgcacttttccaacagtcgtagcaaatggcacaccaggagattatatcctgcacctggcttggagggtcctacccccatggagcctcgctcactgctagcatggcagtctgagatctaactgcaaggcggcagcaaggctgggggaggggcacctgccattgctgaggcttgagtaggtaaacaaagcagcagggaagctcgagctgggtggagcctactgcagctcaaagaggcctgcctgcctctgtagactccacccctgggggcagggcatagctgaacaaaaggcagcagaaacttctgcagacttaaacatccctgtgtgacagctttgaagaaagtagtggttctcccagcatggagtttgagatctgagaatggacagactgcctcctcaagtgggtccctgacccccgagtagcctaactgggagacacctcccagtaggggctgactgacccctcatatggccgggtgcccctctgagaccaagcttccagaggaatgatcaggcagcaacatttgctgttctgcaatatttgctgttctgcagcctccgctgatgatacccaggcaaacagtgtctgagtggatctccagcaaactccaacagacctgcagctgaggggcatgactgttagaaggaaaactaacaaaccgaaagaacatccacaccaaaaccccatctgtatgtcaccatcatcaaagaccaaaggtagataaaaccacaaagatggggagaaaccagagcagaaaagctgaaaattctaaaaatcagagcgcctcttctcctccaaaggaatgcagctccttgccagcaacggaacaaagctggacagagaatgactttgacgagttgagagaagaaggcttcagatgatcggtaataacaaacttctccaagctaaaggaggatgttcgaacacattgcaaagaagctaaaaaccttgaaaaaaagattagacgaatggctaactagaataaacagcgtagagaagaccttaaatgacctgatggagctgaaaaccatggcatgagaactatgtgatgcatgcacaagcttcagtaaccaattcgatcaactggaagaaaggatatcagtgattgaagatcaaatgaatgaaatgaagcgagaagagaagtttagagaaaaaagagtaaaaagaaatgaacaaagcctccaagaaatatgagactatgtgaaaagaccaaatctacgtctgattggcgtacctgaaagtgatggggagaatggaaccaagttggaaaacactctgcaggatattatccaggagaacttccccaatctagcaaggcaggccaacattcaaattcaggaaatacagagaatgccacaaagatactcctcaagaagagcaactcaaagacacataattgtcagattcaccaaagttgaaatgaaggaaaaagtgttaagggcagccagagagaaaggtcgggttacccacaaagggaagcccatcagactaacagcggatctcttggcagaaactctacaagccagaagagagtgggggccaatattcaacattctgttttttttttttgttttttttttgagacggagtctcgctctattgcccaggctggagtgcagtggcgtgatcttggctcaccacaagctctgcctcccatgttcacaccattctcctgcctcagcctcctgagtagctgggactacaggtgcctgcccccacgcccggctatttttttgtatttttagtagagacaggatttcaccatgctagccaggatggtctcgatctcctgacctcataatctgtccaccttggactcccaaagtgctgggattacaggcatgagccaccatgactggcctcaacattcttaaagagaagaattttcaacccagaatttcatatccaaccaaactaagcttcataagtgaaggagaaataaaatcctttacagacaagcaaatgctgagagattttgtcaccaccaggcctgccttacaagagctcctgaaggaagcactaaacatggaaaggaagaactggtaccagccactgcaaaaacatgccaaattgtaaagaccattgatgctaggcagaaactgcatcaactaatgagcaaaataaccaactaacatcataatgacaggatcagattcacacatgaaagtattaaccttaaatgtaaatgggttaaatgctccaattaaaagacagactggcaaattggataaagagccaagacctatcagtgtgctgtattcaggagacctatctcacatgcagagacacacataggctcaaaataaagggatggaggaagatctaccaagaaaatggaaaacaaaaaaaaagcaggagttgcaatcctggtctttgacaaaacagactttaaaccaacaaaaatcagaagagacaaagaaggccattacataatggtaaagggatcaattcaacaagaagagctaactatcctaaatatatatgcacccaatacaggagcacccagattcataaagcaagtccttagagacctacaaatagacttagactcccacacaataataatgggagactttaacacgccactgtcaacattagaccaatcaacgagacagaaagttaacaaggatatccaggaactgaactcagctctgcaccaagcggacctaatagacatctacagaactctccaccccaaatcaacagaatgtacattcttctcagtaccacatcacacttattccaaaattgaccacgtagttggaagtaaagcactcctcagcaaatgtaaaagaacagaaattatagcaaactgtccctcagaccacagtgcaatcaaattagaactcaggattaagaaactcactcaaaactgctcaactacatggaaactgaaccacctgctcctgaatgactactgggtacataatgaaatgaaggcagagataaagatgttctttgaaaccaataagaacaaagacacaacataccagaatctctgggacacatttaaagcagtgtgtagggggaaatttatagcactaaatgctcacaagagaaagcaggaaagatctaaaattgacatcctaacaacacaattaaaagaactagagaagcaagagcaagcacactcaaaagctagccgaaggcaagaaataactaagatcagagcagaactgaaggagatagagacacaaaaaacccttcaaaaaatcagtgaatccaggagctggttttttgaaaagatcaacaaaattgatagactgctagcaagactaataaagaagaaaagagagaagaatcaaatagacgcaataaaaatgataaaggggctatcaccaccaatcccacagaaatacaaactaccatcagagaatactatgaacacctctatgcaaataaactagaaaatctagaggaaatggataaattcctggacacatacaccctcccaagactaaaccaggaagaagttgaatccctgaatagaccaataacaggctctgaaattgaggcaataattaatagcctaccaaccaaaaaaagtccaggaccagacagattcacagctgcattttaccagaggtagaaagaggagctggtgctattccttctgaaacgattccaatcaatagaaaaatagggaatcctccctaactcattttatgaggccagcatcatcctgataccacagcctggcagagacacaacaaaaaaagagaattttagaccaatatccctgatgagcatcgatgcaaaaatcctcaataaaattctggcaaaccgaatccagcagcacatcaaaaagcttatccaccatgatcaagtggggttcatccctgggatgcaaggctggttcaacatacgcaaatcaataaatgtaatccagcatataaacagaaccaaagacaaaaaccacatgattatcttgatagatgcagaagaggcctttgacaaaattcaacagcccttcatgctaaaaactctcaataaattaggtattgatgggacgtatctcaaaataataagagctatttatgacaaacccacagccagtatcatactgaatgggcaaaaactggaagcattccctttgaaaactggcacaagacagggatgccctccctcaccattcctattcaacatagtgttggaaattctggccagggcaatcaggcaggagaaagaaataaagggtattcaattaggaaaagaagaagtcaaattgtccctgtttgcagaagacatgattgtatattcagaaaaccccatcgtctcagcccaaaatttccttaagctgataagcaacttcagcaaagtctcaggatacaaaatcaatgtacaaaaatcacaagcattcctatacaccaataacagacaaacagagagccaaatcatgagtgaactcccattcacaatcacttcaaagagaataaaatacctagaaatccaacttacaagggatgtgaaggacctcttcaaggggaactacaaatcactgctcagtgaaataaaagaggacacaaacaaatggaagaacattccatgctcgtggataggaagaatcaatatcgtgaaaatgaccatactgcccaaggtaatttatagattcagtgccatccccatcaagctaccaatgactttcttcacagaattggaaaaaaactactttaaagttcatgtggaaccaaaaaagagcccgcattgccaagacaatcctaagccaaaagaacaaagctggaggcatcacgctacctgacttcaaactatactacaaggctacagtaaccaaaacagcatggtactggtaccaaaacagcatggtactggtaccaaaacagagatgtagaccaatggaacagaacagagccctcagaaataataccacacgtctacaaccatctgatctttgacaaacctgacaaaagcaagaaatggggaaaggattccctatttaataaatggtgctgggaaaactggctagccatatgtagaaagctgaaactggatcccttctttacaccttatacaaaaattaattcaagacggattagagacttaaatgttagacctaaaaccataaaaaccctagaaaaatcctaggcaataccattcaggatgtaggcatgggcaaggacttcatgtctgaaacaccaaaagcaatggcaacaaaagccaaaattgacaaatgggatctaattaaactaaagagcttctgcacagcaaaagaaactaccatcagagtgaacaagcaatctacagaatgggagaacatttttgcaatctacccatctgacaaagggctaatatccagaatctacaaagaacttaaacaaatttacaagaaaaaatcaaacaaccccatcaacaagtgggtgaaggatatgaacagacacttctcaaaagaagacatttatgcagccaaaaaacacatgaaaaaatgctcatcatcactggccatcagagaaatgcagataaaaaccacaatgaattaccatctcataccagttagaatggcgatcactaaaaagtcaggaaacaacaggtgctggagaggatgtggagaaataggaacacttttacactgttagtgggactgtaaactagttcaaccatcgtggaagacagtgtggcaattcctcaaggatctagaactagaaataccatttgacccagccatcccattactgggtatatacccaaaggattataaatcatgctgctataaagacacatgcacacatatgtttattgcggcactattcacaatagcaaagacttggaaccaacccaaatgtccatcaatggtagactggattaagaaaatgtggcacatacacaccatggaatactatgcagctgtaaaaaaggacgagttcatgtcctttgtagggacatggatgaagctggaaaccatcattctgagcaaactatcgcaaggacagaaaaccaaacaccacatgttctcactcataggtgggaaatgaacaatgagaacagttggacacaggaaggggaatatcacacaccagggcctgtcgtagggtggggggagggggaggggggaaggatagccctaggagatatacctaatgtaaatgacgagttaatgggtgcagcacaccaacatggcatatgtatacatatgtaacaaacctgcatgttgtgcacatgtaccctagaacttaaagtataataataataataaaagaaaattatttttattcatgtacaaaatggagtactattcagccatcaaaaagaatgagatcccatcatttgcaaggacatgggtgactggaggtcattatgttaagtgaaataagccaggtacggaaagatacatgtcacttgttctcacttacttgtggaatctaaaaatcaaaacaatttaagtcatggagatagaaagtagaaggatggttaccaggggatgggaagtatagtaggaggccggggtgggggaggtggggatggttagtgggtataaaaaaatagaatgaataaaacctagtatttgatagcacaagagggtaactatagtcagtaataatttaactgtacatttaaaaatagcaaaaagtataattgaattgtttgcaacacaaaggataaatgcttgaggtgatggaaatcccatttaccctgatgtgattacacattgcatgcccatatcaaaacatctcatgtaacccataaatatatacacctactatgtacccacagaaattaaaaatgaaaaataaaaaaaggttcaatccacccaaaaaataataaataaataaatcaaactttttgcaggcatctcaagatgaaggtttcctatttgtgattatgaaaaaaatgtcaagaacaagtcccttggtgttcttagaccaaagtcagaacaacagacctagtaagtattctctcagcattcattacatgttagcaaccttcaaagcagtttgtgttccctcatatggtcctccatgaggtaagtatcagagctatagtaagatctatttaacagtgagacccaaatgtgtcccaagaccactcaggattgccctggtaaccctgaagctcgaaaatccctgagatcaagactgaaggagtctgtgttgttcctcccgcatgcttcttccttgcatgtccctttttcttccctttctgtatcctttcttccccatctttaatttcttcatttccaatggtttcctgcgtctttacaaaatcacttaatctgtggaaataaactgaattttctatttgctggttacagcattaaacaataaaagctagatgggtattcaccaaatttagagggtatagtttggaatatttggtcatctagtttctgtagagttgatgaaattcattttgtggtggtggcagggacctgagagagatggactgtgataactccagtgtggctaaaacaggttcaagaggaagcctgtgtgactgtcaatcagaggagggatggttcatatcagggtgacatggtcagagtaacaaacagtgctttcaaggcaagctctgattcaaaagccacaagggcggatgcggggaggccaggagctgatctgcagttgagctccttcttcgtgggcaactctatgtggcatcctccagtgaaggcatcaggaatctctttatttaataatgtttaatgattctcctgtgcaaatgtgtattagggcctgctctgtaattgtgggatggggtggagggataagtaagaaatgaccccaactctctaaaatttcacatcctggcagagcagactgaagcacaaatagtatcaagccctttataatagagcaggggttctcagtttgggcactattaacatttagggtagaatactttttttttttttttttttttttgagacggagtctcgctctgtcgcccaggctggagtgcagtggggcgatctccgctcactgcaagctccgcctcccggtttcacgccattctcctgcctcagcctcctgagtagctgggactacaggcgcccaccaccacgcccggctaatgttttgtatttttagtagagatggggtttcactttgttagccaggatggtctcgatctcctgacctcgtgatccacccgcctcagcctcccgaagtgctgggattataggcgtgagccaccacgcctggcctagaatacttttttgttgtggggactgtcctgggaattgtacaatatttaacagcatccctggcctctacttactagatgccaatagcattcccctggtcttgaaaatcaaaaatgtcttcagatgttgtcaaatatcctctgggagtaaaattactaggtcatgtgtacgccaagtccactggctccaagcccaggacagcaccaggagttgcccaggaattgcaacctttgtagcttagactgcctttcaagtttatttaggacccagagcactttagctcgtggtggtgaggctagccagaatttaagttctgaccctgggatgaacagtttgcctctggctaggactcatctaaatgccgccttcatctatgttgggtgagtttctgtcaagtgttgctttccgctgtgacagggctacactgagttccaatgcaaaaccccatcatcactgcactctgcctcctccagcacacacattctctctcaatgccatgtggccactgtggggggagacaggtggggtggtgtaggcaattcaaaactgtctctcctaccatcttcagtgcctctttccttgatatgatattaaaattgggcactgcgattactcagatgagtttcagtccttatgaaggtgttttcttatgtggatagttgttcaatttggttttcctctggggagaggcgggatgatcgctggagagttctatttggccttccttcttcctttcttgagagaaggtgctctgagcttaaattatgctaatatatgaatgcagagagaagagaaagagcaggtgcaatgaggcagtgaaagcctgaaattagccgcaagaagggtaaaaagtgcagtaattcagtagaggctgagagtaactgagtcatcacaaagccaggagcacgggagagcacagagcatgccggctttggagacacaggtcccagagccattacagcatccacagggctcctgttggataagttgcatctcctttgatcaggggtgtgaggcaacttctatttccttccttacctttgtattcttacaataaactcgaatacctccggtaacacaagcacatacctgtgcctcctaccaagaaaataaatacctcgatgacgtcgggttgtattatataattgtggggaagaacagaagggaaaaaggagagacattagctcactttttggggaaaatccttgctttgctgaggtgggtaaaacatttaaaagttaatctgttaaaggaactggaattctctgggcacatgccaacccgcagctgagacgtggtctggaattgtgtgactaagtaaaatggttcataggaaaaggtttgcctctgtgtcaacaggcagatgattcgtaattcatcaagatttagccaagacaataagagaaatatatgagcattgcaaaggactcatctcaggcatcaccttctcaggggaagactcttctaacacccttcttccctgcgcaagacctagtgtcatcccattcctccagggcccgtaacactcctgatgcacttctctctttgatcatactgcatcggatggtactcatctatttactcatttctcttcactgggctatgggatccctggaggcagggactatgtttaatacgtcttgatatccccagccactaaccaatggcctccatatagtaggcactcaataaattgttgagtgagtaaatgagcaaattcactcctacagtttacctcacgtactttttaaggaggggaaaagaatccattttaactcgagtataggttttctttcctgaagagcatatggataaaggacagctactgatttcttcagagggagaaaaatgatagaacaggcctccatgctatatttcaaactcatgtcaagttttcttttaaaaaaatgtctgtccaccagcagtcatatcatttttcaaatttcatgtcgtccattttctgaggctgcccatctgtcattttacgcagagagtatccatcatgatagaagctaaataattttcaaagccgtcaaggaatggacacaaaaaaggtccccatttcatctgaacaaagttgtccaaggctggcggtgaggatatgactgggaaaggacagatggcaccctgggagtgcctctcaaattggttccaaatggaacaaagaaaaaattcatttgagaaactagacttcagtccttcatgttttatgttacacatgcacctatcagtaccataattaggtaagagtttatttagagcaagtgtgtctgtaaaaataaaattcattttttctaatgattatgtttttctttaaacatagttatgtatatagttttttctaattttaatcttaagagtgaatcatatttatttgccgaatacagaaaagtgtaaggtggaaagtaaaaatcacatattattgcattacacagaagtaaccattaatactgttatttttgatgcattttttagtcacatacacatgtttgtacacacacacaatgtatatatgcatatttatatattttgagacagtttttatatataatatatataataaaatatataacataattatataatatataaatataatatattataatatataatatataaatataatatattataatatataatatatgttataaatataatatatattataatatatataattatgttatatattataatatatataatataataacataattatatataatatattatataattatatatatatatttttatatatataatatattatataatatattatatatatacaatatatattattatatatattatatatataatatattatataatatattatatatattatatataataatatattattatatatattatatatatatattttgagacagagtttcgctctttttgcccaggctggagtgcaatggcacaatctcggctcactgcaacctccacctccccagttcaagtgattctcctgcctcagcctcctgagtagctgggattacaggtgtgtgccaccacacctggctaattttgtatttttaatagagatggggtttcactatgttgaccaggctggtctcgaactcctgacctcaagggatccacccaccttggcctcccaaagtgttgggattacaggcgtgagccaccacacctggcctatttgagtatatatatgtgtgtgtgtgtgtgtatatgtgcataaactgtagtattatttacaattttggtattatattctttatggaatttcatatcctgcttttctcactacattatatcttaaattattttttatgccattaagtattctgggaaacatgattttttttttacttcaaatgttcacgttctttttgatttttaaaattttattttttaattgacaaggaataattatacatattcatagggcacatagtgattatacatattcatagggcacatagtgatgtttcgttatgtgtaatggatagtgatcagatctgggtaattggcatatccatcatcttaaacatttatcacttctttgcattggggatgttcaatatcctccttccagctatttgaaactataatatattattgttacctatagtcatcctgtagtgctatagaacactagaatgtattcctcccatctagctatacttttgtatcatttaacaattccctccctattccctcatccccctacccttcacagcctcttgtatcttctgttctactttttacttctatgagatcaatttccttttttagcttccatacatgaatgagaacatgtggtgtttaactttccgtttctggcttatttcacttaacataatgtcctccagttctatccatgttgctgcaaatgacaggatttcattcttttttatgaatgaatagtattccattgtgcatatataccacattttctttatccattcatctgttgttagacacaggttgattccctatcttggctattttgagcagtgctgccataaacattggagtgcagctatctctttgatttaatgattttctttcctttggatagattcccagtagtggaatcatatggtagttctatttgtgatttttgaggaagctccatactgttttccataatggctgtactagtttacattcccaccagcagtgtataggagttcttttttactctgaatctttgccagtatttgttattttttttctctttttgataatagctatcctaccaggggtgagataatacctcattgtggttttcgtttgcatttccctgataattaatgatgttgagcattttaaaatacatttgttggtcatctgtgtattttcttttgagaaatgtctgttcggatcatttgctcatttttaaattggattgtttgttttttttttttgctgttgagatgtttggatcccttgtaaattctggacattaattcgctgtgagatgagaagtttgcaaatattttctcctattttagaagttgttttttcactatgttgttttctcttcttttggaagctttttagcttgatataatcccttttgtttatttttgcttttgctctctgtgcttttgaggtcttaattcataaaatattttttctgaccaatgtcttgaagtgtttcccctgttgttttctttcagtagttttattgttttgaactttatatttaggacgttgatccattttgagtccatttttgtatagagtgagagatgggggtctagttttattcttttgcacatggatctctggttttcccagcaccacttattgaagagactgtcctttcccccaaatgagtgtttcggtacttttgtaaaaaatcagttggctgtagatatgtggattaatttctgggttctctgttctgtcccattagcctatggatctatttttatgtcagtaccatgctattttgtaatatatctttaggtctggtagtgtgatacctccagctttgttctttttgctcaggattcctttggatattcaggatattctgtggttacatccaaattttagatttttttttctatttcagtgaagaatatcattggtattttgatagagattacattgaatctatagattgctttgggtcattttaacaatattaactcttttgataaatgagcatggaatattcttccatttgtatcatctataatttctttcatcaatattttacagttttcattgtagaggtcttttacctcattggtatttaatttcctaggtatttaattttttagtagctattttaaatggggttactttcttgatttctttttcagctagttgtttgtgtatagaaatgctactgattttttttattatactttaagttctgggatacatgtgcagaacatgcaggtttgttacataggtatacacatgccatggtggtttgctgcaccgatcaacccatcatctacattttgtacaataattttatatactgcaactttactgaatttgtttatcagttctagtagtttttttggtggagtttttagttttttcaaatataagatcatatcttcaaacaagaataatttggtttcttttttcctaatttggatgtcttttctttttttcacttgccgagttgccctggttataacttccatgctatgttgaaagactggcgagagtgggcatcttgtcttgttgtagttcttaaaaaagaagctttcggcatttccctattcagaaacatattagctataggtttttcatgtatccatttatacctaatttattaaacatttttatcattaagggatgtttgaattttatcaaaagatttttcttcatctattgagaggatcatacggttttagttcttttttctactgatgtgatgtacaatgtttattgacttgtatatgttgaaccatccttgcttcctaggataaatcccacttgatcatggtgtgatacctttttgatgtactgttagattaggtttgctagtatttttttgagggcttgttcatctatgtttatcaggaatattggactgtagtttgcatttttaagtttgtgttcttgtctggttttgatatcaggtttatgctggccttgtaggatgagttaggaagagtttcttctgcttcattttatagaatagtttgagaactggtgttaattcttctttaaagtttcagtagaattcagtggttaagccatctggtcctggacttttttgttggaagacttattattactggttcaatctcgttacttgttattggtgtgttcaggttttctatttcttcttggttcaatcttgctaggttgtatgtgtccaggaatttatctatttcctctaagttttcaaatatgttagtgtatagttgtacatagtagtctctagggatcctttatatttctgttgtatctgttgtgacatctttttttgcttttgattttattttggtattcccttttttcatagtctagcaaattgtttattttatttatctttttaaaaaactgacttcttgttttgttaatcttttgtaagttttttagtttcagttttgtttatttttgttttgatatttattatttttttattctgctaattttaggttaggtttgttcttgcatttttagttccttgagatgcatcaagtggtttatttgaaatagttctaattttttatgtaggcattttttgctataaatttgcctcttaatactgcttttgctgtatctcataggtttggggatactgtgttctatttttatttatttcaaataatttttaaatttcattctttattgcatccttcacccattggtcattcaggagcatgttgtttaatttccatgtattcatataattttgaattttcatcttgttattagttcctagttttattacattgtaatcagataaaatatttgatatgattttaagtttttaatttttctttgagacttgttttgtatcctaacatatggtcaatcctgaagaatggagtgttgtagtcaccaaatattattgtattgggatctatttctccctttagatctaataatatttgctttatatatctgggtgctccagtgttgggtgcatatatatttataattgttatattctcttgctgaattgatccctttattattatttaatagacttctttgtttctttttacagtttttgacatgagtctgttttgtctgatataagtatagctacctctgcttacttttggtttccatttgggtggaatatatttttccattcctttattttcagtctatgtgtgtctttacatgtgaggtgagtttcttctaggcagcatatagttgggtcatgtcttttatccattcagtcagtctttatcttttaaatggggaatgtaatctgtttacattcaagattattattgatagatgagggcatactcttgttattttactgattgttttttagttgttttgtatatccttcattacttacttcctctcttattgttaatttttgtgattgggtggttttttatcgtgataatgtttaatttttttcctctttgtcttttgtgtactggttctcccagtgagttttatagttttgcatgttttcatggtggttagcatcttttcactttttaatgtaagactctgttgagcatttcttgtgtggctggtatggtggtgaagaatccccttagtttttgcttgtctgtgaaagattttatttctctttcatttctgaaggatagctttgctgattataatattcttggctagcaatatttttcccctagtactttgaatatatcatcctgttttctcctggcctgtaaggtttctgtagagaaatgcattattagtctaatagggattcctttatacgtgacctgatgcttttccattgttgtttttagaattctctttttgtctttgacttttgacaatttgactgtaatatggctcagggtagacctttttaggttgattctatttggggatctttgagcttcctgggcctggatatctatctctctcctaatacttggaaaaatgttagctattatttcataaaatatgttttctatactctgtctcttctcttctcctggaacacccataatgtgatatttgttacttaatgatgtcccataaatcctgtaggctgtcttaattttttttcttgtgtctgcctgtgttatttcaaaagacctttcttcaagttcagaaatttactcctctgcttgatctagtcttttactgaaactcttgattatatttttaatttcattcattgaattcttagctctagggtttctgtttggctcttttttcatgatagcaatctccactgaatttctcattcatatcatgagttgtttcctaatgtcactgaattgtctgtattcttataccttactgagttttcttgattattattttgcattctttttctggcatttcacatatttcattatgattggggtctgttactggagaattattgtgttcctttgcaggtgtcatttccttgcattttttatgtttgatatgtcatgttaatttccatgtatccaggggaaaagtcacctctttcaattttatggtgtagagtttgaagagaaagtttgattcataatgatgtgtcttggagggtcagtttggtggggtttgttggctttggttttatgtgaatgcagtagtgcagtctccatgtagtttcttcagctgtaatccatgctagtgatgtttgtgagtgtctcagtgacatatgctgaggaaatatgtagtgtgattgtatggctttgctgggggtgggattgctgggctgtttctcaggtcaggggcgtgtgagtgctcaacctaggacctgccttgctagggttgcagtcatgggactgttactctggctatgggcatggatgcacagttgcttggccaatgtgggagcatgcctgctaggggcagaccatagggctttttctcaggctctggacacagttgcaaggctgcttggcttgcctgtcagtgtgtcttccttcccagggttgtttctcaggtctgggatgcaggtgcaaggctacctgaccagcctggggagtgtctttttggggaagctcacagggatgcttttgcagctcaggatataggcgcacagttgcatggctgacatggggttatgcctgtcaggggcagccaacagggctgtttctcaggcccaagatgggggcacatagcttcttgactggcttaggggcatgttagttgcttggtggctgagggaactctcctgctcaggagagggcacacagcagtttggctggctcaagagtgggttttccctgggtggaatggccaggctgtttctctggctggtagtataacagcagaaggttggtttccctgatgtggaggaccagactcacagccaatcttgggcccatgctccatgtggctggagttgtggtgtccagcaaccattgtagcattggtggaatgaagatggatccccactgctggagaggctactggaccccagagcagtgtgcactccagaggcagctctggtctcaagatggcaccatgctgcagcagtttggttcatgggggtggggtgggggtgggaagtgtggaagtgcatacacattgtgctcctactctggggcaatgcagctgcatgaattcccagcagctctccaagccagactcaggactgtgagattcctctgcagtaagaactgtaggtgtttgtggtggtgataggggctggtggggatcttctgcttaccttttttctgcaaggggaaatcccttctgaatctgggcagatctgatccaagtggggaaaatgaggctgcagaggccagattcctccatgctgccctcctggacttccagtcactacagatgtgtctccactcccccactgcactccagtactctctcttcagcactccagaaaatcttagccattcattgccattgtcctttcttgggggatgaacactaggcctctctagtcagccaccttgctgatgtcaatctttgaaacatgattttttaaaggttacattatatttgattttattgatataccattatttatgtatggttagacataatgattattctgtttttttgcaatgtggtattttatttattgcattttctctgtcttttagctattctgtgtttatcatctatatagttctcaagaatcataatcttatctttttattagaatgtcaaagttaggtaaatgggcttttaaagaaataactcacaaagattcaacctacaagaagctttttgattgtctcttaaatcaatgcaagttattatatatgttcacttttataatatagattaaattctgtcaattaaatgagtatgcttgtatctttcctatttgctgatatgttgtgagatgatgtacaagtcttcattttggattaaaagaggctgcagatatgtgcagaatgggtatgaaagtttccttacaagagagaataaaaggatggtttaactcttgctagaaaaaccccagctttggcatttgtttgctcagtaaccttggacactttttttttgacttataagagcctcaactttctcatctataaatttgtgggagataatattatataagattttgcagatcagatgttaggattacatggacaaagaatatcaattgtgtatcacagagtacaatatactaggagtacccatacacaatagactttgttgttattatttattctagattctatcttaaagcaggttaaatgttagatgtctcttctggaaatgaggcagaagtgacagaggccttgagttatttgaccaagcagttaaaaatgtaattatttttaagtaatcctatacctggcttttctttttaattttgcatagctttattgagatgtaatttacataccataaaattcacctgtttacatgtaaaattaaatgatttttagtaaatttatagagatgtgcagttatcaccacaattcaatttgtgagccattccatcataccaaaaaagttctctcagacccatttgcagttactctgtgttcctactttcaactctaggcaaccagtaatctactttctgtctctaaaggtttgccctttccatacgtttcatatagatggaatcatataatacgtaatcatttgcctctagtttttttcacttaatgtagtgtttttgagattcatctatgtcctaccatgtatcagtactttttccttttgattgccgagtagtattccactgtgtggacatatatatttagtttgctcattcatctattgatggacatttgtattgttcccagtttttggctattataaataatgttgctatacatatgcatgaattggtctttgtgtggatataaattttcagttctctaggatatatacctaggaatggaattactggattgtatggtaatttatatttaactttatttatttatttaaaaatttatttaagaactttaaaaaaaattttaaaaattaacagttttaaaattgtacctatttatgggatgcatagtgatgttgcaatacatataatgtatcgtgatcagatcagggtaattagcgtatctattataaacatttatcacttctttatattgaggacattcaatatcctccttctagctatttgaaactatatagcattgttaaatatagacatcctacagtgttaaagaattgtagaagttattcctcctatctagctgtaattttgtaatctttaacaattctctccctacctcctcatccgcctactcttcccagcttctagtatcatccattctactttttacttctatgagatcaactgtttttagcttccacacatgaataaaaacatgcggtgtttaactttctggcttatttcacttaacataatgtcctccagttccattcatgttgcctcaagtgataagatttcattattttttatgaatgaatagtattccattgtgtatatataccacatattctttatccattcatctgttgttgaatacttaggttgattctatatcttgactattgtgggaatgccaatgtcttttcaatataatgattttcctgccttttgataaatgcccagtagtgcgattgctcgatcatatggtagtcttatttgtagtttttttgaggtatctccctactgttctccatagtggttgtactagtttacattcccaccaacagtgtataagaattgccttttctctgaatccttgctagcgtttgttattttttgtttttccgataatagctatcatagctggggtgagatgatatcttattgtggttttgatttgcatttctctgatgattagtgacgctgagcattttttcattggtcatttctgcatttaactgtaaaacaattttcaaactccctttcaaactgttttccaaagtgtctgtacccttttacatttctactagcaattgtcctgctttttttgagtatattctcatttagcataaatcccaggccaggcgcttaacgtagtgtcctccaggaggacaagtctttgtgtgcttacaggctcatgcctgtaatccgagcactttgggaggccatggctggcagatcacctgaggtcaggagttcgagaccagcctggccaacacggcgaaaccctgtctctactaaaaatacaaaaattagctgggcgtggtggcacatgcctgtaatcccagctactcgggaggctgaggcaggagaatcacttgaacccaggaggcagaggttgcagtgagccgagattgtgccgttgcactccagcctgggttacagagtgagatttcatcatcaacaacaacaacaacaaaatccccaaatatacgcacacatttttcagcaaaccaggatcttttgtttacacaaacaaacaatgagaatatctaaaagttaggacaccatgtacataagaataagcacttttaagaaactactatgggtaaggcacatgacattgtaaatacattttctgtgaatacataacaaccatatgaagcaattactgttatcacctttcacagactaaccaacaagaaccacaaggattaatgaggtttcaaagcagtccagtgacttgtgggtagcagcatcaggatttgaacccaggtccatttggttccaaagccagtgctgcactgactgccaaagcaagaaacaaattcatgctgtctacatgattatccagattgagaaatagtctttattaaagagtgtttaaaaatggctgttaatggccccagggataggctttctttctcttagccacagcctgttgtcttcacccaaagcagacggaaggataaggatcaacatttcatggcaaatatgctgagagtctggaactgaaatgaaggttgcctggggcctctgtgagagaaggcgtctggaactgttcggtgtgcttctgctacactggcctgcggcctatgcccagctctgcctttttctagctgtgtgactttgagcacattggtcaacctctctgaacctgtagatgaaggtgaataacagttgcacatcttgggtggtggtgaggatttgaagtacttgaaatcattaacggggaagtttcaccactgtgcagtaccaagtgctgacaataggacccttccttcctgtcttagtccactggggctgctctacccataatgctatagattggatggcttatcaacaacagaaatttatgtgtcagttcttgagactgggaagtccatgatcaaggctgcagcatattcggtgtctgatgaggacccactttttggctcatagacagccatcttgctgtgtgtcctcacatggtgaaatgagctctctggggtctctttgacaagggcattaatcccgttcatgagggctccatcttcatggcctaataccttccaaaggccccacatcctagtatcatcaccttggggattaagatttcaacgtaggcattttgtggaatcacaaccactatgggactataggactataagacttccacactgtcaccttttctcttttgagaggcttatgagtgtcctgagctgtcaaaaaagaggactagccatttaggagcagtcctgatggggatcagaaaattctttggacatgtgtgggagactcttctgcaggacagtacaagggtgaggtggctggcaagggacagcccctacctgcctgagaagcgaatagccagggaaaggagacaagggctcacctggcacaaggcttcctgctgtgagcaagggatggtgctttgaactctctcagggctaactgcctcttccaggtggccctgcctacaactgagttccagatactgttccaacctcctctgagctccattgagtcactgggcactcccagcccaggtgactttcatctcatctctccaggagcaggctagtcatcctctccctctatcccagtggttctcaaccttggctgcatattggaatcatttggcagaacataaaaagataatgatgcccaaaccctactcccggagatcctgatttaattggcctggggtgtgtcctaggcgttggaattttttccaggtgattctaacatgcagctaggcatgagagtcattgcttgttctcactgcaaatcagtatcatgtcattttctatctccagaatgaggtggagctagctggcctatactggtttgtgagagcccattattgaaatctcaggaactttacaaaccagttattaagaatggtcattattaaaaaaaaattatatgaactttcaattaaataaatttgattagcagcaaagataataaagtctcaaaactaagtaattcctaattattttgcattttactgttacctacactttacgttatttgcatctattgcatctctgttacatagtatgacaatactatataatcatgtactatggtgaatcatttcccacttccacgttcagtgacatcatgttagtagcttgaaatagttcatggtgggaatatttacaccacagacattggcaaacgatacaagtcaaggctttatttattgttttgctgattgtctaggcttgagaaaatgacagaagtcctgttaataatgcagattaaacttgaatacgtttcatgtctatagctgttgtgaagagcaaaagaactgaggtcatattctttgagtatttgaaagctatgacatgattcagcaataaagcagctcatatcatcagtgagtaagtataatttccatatttttgtattttcactttaattttactctttactgtagacaaaaatgttagccaataatcatgtctccgctatactcatttatcaattgtaaccataggttgactgtggggacaagggctgagaaggaaatcaatgaaagtattatgtgagaatcaattaactctatggaatttataataaatactgaatatcttattattatttgcaaattgtgtgcaacatatcctttatatcagtaaaatttgtagcaaacatctatgtgtatatatacatccttttttttttcctcgagaaccagttgttaaacttacactagcatgctaccacctacctccacacctttcttcaaaagatctttatcccctgactcactctcttttctccatattcctgataaggctgttcttccagaagccagaggaaagccctttgttatagtctttacaggttagccttccacacctcttggagaagaatgggagggatctggaggggcaaacagaagatatacgacataattagctgttttttaaaaattattaatagatttcagctgtgcctggaagcactcaatcctccagtcactctgtggctagatattatttctaaacacatatgaaacctgctgcaacaacaaaatctataaaatacatgtctgcttttctttctactgatggtccacatggatagtaagaaatgcatccacagaggcactgcccacgtcttaaaacatgagagaaaaggataacagctatgaacagcatgttaaggcttaggtttcttggcatgtcctgtgatagtgtccttgtcatctatttctgcataacaaaccacttaaagacttaatgactcaaaacagtgacaaacatttatcctgtgcacaagtctgtaatttgaatagggctccgtggagaagacttgaatccactccacatagcattggttgtggggattgacttagggctggaggatctaaatcctctatgctcactcccatggctggtgaattgatgttggcaatcagctaggagtccagggggctttggctcctctttacgtggcctgggcttccttacaacatgatggttggattccaggggcaaatgttctaaactagctgaaagccatgttgccgtgtatgacttagctttagaaggcacatagcattacttatgctgtattctattatttgatgcagacaaaaagccccatccaggttcaagcgactccacatcttaacgggggagtgagaagttctggaagagcatgtaggacaggaaatactattgtgaccctttttagaaattataatctgtcacagctagaaaggaagagaacgcctcccaaaacactgcatgtccctggtgtcttgtgttttgtgcaagaaatcagcaggacatattccacgactagtccagaatgacaagtggtaagaattgagaaatgggggtcaactgaggtgaaggggaaatatgttgtttttactaacagaaatgtctaaagagttaatgatacttcaggtcatttttcaatagactgtaggtatgtgaaacagtggaagtgttccattatgaaaagcttaatcgagatagccaatggaagtattgaaaggtcattaccataatacatttgcagaagaagcgctccaaatcattgtgaaactccatggccgcatactccacaattacctggagtagagagacagtcagggtgccccatgccatctcccccagaatggaaaaagacaagttgctcacatgagaatccaaatgaagtgtgtcagaaacaaacagtactcacattaggcagggataaagttctagctgcagaatgattaaatactttttttttttaatgggaagagacctttttaaacctttttaaaggttgcgtagatgcagagactctgagataaagggattcttttccaaccaaagtataggtagttttctttggttagttaaagaagcttaaatggacatgacccctagaagggatcgtttattttatgaaaagcatccagaatatacaatcagttatgtgtggttcacacagttctgttagctaaaaagggaccaaggtaagattgtgtgtctttttacagatactattttgacataatttctgacttagagaaaagttgcaaaaatgcagaaataatatttacccagattgctcagatgttaaatgtttagaatatttgcttttttccccttcctccctccctccctccttccttccttccttccttccttccttccttccttccttccttccttttcttttgtctttttttttttctttttttttgagacggagtctcactctgttgcccaggctggagtgcagtgacaagatctcagcttactgcaacctccatctcccaggttcaagcaattctcttgcctcagcctaccaagtagctaggattacaggcacatgccaccacagttggctaatttttgtatttttagtagagacaggatttcaccatattggccaggctggtctcaaactcctgacctcaagtgatctgcctgcctcagactcccactttatctctttctttcctttcttctttcctttctcctttccttccccttccccttccatttccccttcccttccctcctttcctttttcctttcaagacaggctcttgctctgtttcccaggctggagtgcagtgacatgatgatgactcactgcaacctggacctcctgggctcaagcagtcctccccactcagtcctagtagctgagaccatgggcgcacaccatcacacagggctaatttttaaattttttgtagacaaggtatcactgtgttgcccaggctggtctcaaactcctggtctcaagtgatcttcccgcctcgacttcccaaagtgctgagattacaggcatgagccaccaggcctggcctctttctctttaatctatctctatctgtatctctgtctctgtctctacctctatctctctctctacctctggctctttctctatatcataaacatatagtctgcatctatgtctatatgtctaggaagagaaatatacatacagatagatatgtgtttgcatcagatataagtgatgatttttcagaaccatttaagagtaagttgcagacaggatgtccctttatccctaaatacaatgtttatttactaaaaacaaattctcaaattttcttacataatgaaaacacaagtatcataactagaaaattaaaattaatataatgttactatctaatataaagacttcattcaaatttttctatttttcccaataatgttctttatagtaaaataaaatttaagaccatgtgttttttatagtaaaatgaaatctaagatcaaacataaaactgatgtcttgataaactcagttctgttactgtacctgaaaaatgggtcgatagacatataaactcttagttatatttgcaaagtcacagagaacccattttaaaatggccttccctgggcatgttaggctgaaacctacaactctttttgttgggccaggcagagaagaatttcttgttgggattcctagaagactggcactacacttagtgtacaggcaatacttgttaaatgtttatttaacactgaataagtattaacattgtaacattaagcattatatgtttaatgtaattaatataatgtaattagttatgtaatataattaatgtaacctaatgtaatataattatatgtaaatagtataacattaaacaaccaaacctagaaaaaaactcagatttaaaagtagtttctgtatcacctaagaataaaaatattttaaacctaagtcatccggggcttgaattttctaattgaaaattagaggcttaggaggatgttaaaaaaatctttatattacttgggtatcattgggtgaactgtgatgttatttataatagttgtcacaatcacctttgaaattctagcaactctgacacattgaggagaataaacagatttttctccttatcaaaactagtccttttactagaatctaaagctgtccttcggattcagactgaggacactgtgactactgaggcaaggatgtgaatgccaggggtgtgtgtagaaggtgagcccaggaagcactggtaggagagtcaagatgtgagacaggaaaaggtagaaacaaataaagagtgaattatctagtaagtcatgactgtggaaaactggggctcacccccactgggcgactcatggaaagagtgaagaacagagttctatggagttattccaacagagagtccaggaagctagtgtatttatgtacccaatcccaccggttgctggtgaaagcctgctgccaacaatactaaggccccagcatatccagtctgcctcatgtgaggggctaatggtctctggcagcctgcaaaatccctcttgcaagggctcccagaggcttatagctggaacctgccatgtcaggctgcacgggcatgatgcttgcctagggatagagatggagcaccttcagcttctacgttttccattcctgccatttggaaccaggtttaatggaattagagaagcatttgaaaaattagatatttgttgtttaagaaaatatgatcaatgaagagtcaaactacttcttcttcttcttcttttttaatgaaatgaacaggtaaaagtccttctatggcttagccatcccagactccagtagaaatgggtatgaagataattgcattatagctaacgagtagtggaaagagtgaagctaacaccaatcgcttgagggaacaagtaaattaaatgctgatgaccttgaccaggcagcaaactacattcattgattattttaattttctctcttctacactcagttaaacatccatagcagtggatttcaaggtaactaaaaggttgtttagcatacttttaaaagagtcaggaatagcagaacaaaaaggcccctatcaaacaaacaaaaaaatacctcatctgatgtgtgtcctctatatgtgggtgtacatgagtgattatttgcctctatgtatctgctcctcagaagggatgcatatgtgtttcaacagaaaggaagaaaaagagaaaattgacaggtagaacatttgaataaaaaagggaggaatgtcctatcctgggtaattctgttatgtgcagcattttaaaactgtgatattatgtggtagaaggaaataaaaacttgaggggaggataataaaatgaaagtgagaaggtgaatttttgtagttctggcttcttagatgtccactgcatttatctgaaaaaggaactcaacctgcttgaaaatttaggctttacaaacaaagtaaaacaaaaacagtttaaagatatttctacttttaaaaaatttttatttatttatgtatttatttgtttgtttgtttatttttgagacagagtctcactctgttgcccaggctggagtgcagtggcatgatcttgctcactgcaacctctgcctcctgggttcaagtgattctcctgcctcagcctccctagtagctgggattacaggcacgccaccaccacgcccggctaacttttgtatttatagtagagacagggtttcaccatgttggccaagctggtctcgaactcctgacaggtgatcctcccgcctgggcctccaaaagtgctgggatttacacgtgtgagccaccgtgccaggccaaaagatatttctaaaatgactaactagttgttgagttttgatggggattatactaaatcagaaatagtaatcaaaattaaagaattaataaggaaataatttgagttatagtgaagggtctttttaagagaatataaatccaaccagatgatatttaaatatgcctttctgttttcaccatttaatggcttgtctggattaagttgttgaaggactagggctgtgttaggatttgaatgtgtcctcacgaaagcatgtgttagaaacttaatctccagggcaatagggttgggaggtggggcctattaggaggtgattaggacaggagggttctgccctcatgaatggattaatgtcattgtcatgggaataggttatttatcttcaaagttggttcattataaaaaagcgaattcagtgctcccctactccctgccatccccctctcaccctcttgccttctgccaagggatgactcagcaagcaggcccttgccagaggctgttgcctcagtattggactttccagccttaagagctgtgagaaataaaaaaataagtttattttcttataagtaacccagtctctgttattctgttaaagtagtgtgaaacagatgaagacaggctgctttgtgaaaagtggttatatgaacacaaaagtttattcttccaggagcactgttaagaagagttagttgggccatcattctggttcttgaactttaaaaagcaggggaaatgtccaaatgaaactctgacactaaaggattcatgttagaaaaacgttaatgccaagagttgtgctaaaaaaaaatgataatgcagttgtactggtattaagcactttcaatcctctataaaaagtgcaaacaggccaggcacagtggcttatgtctgtaatcccagcactttgggaggctgaggtgggcagatcgtgaggtcaggagtttgagagcagcctgaccaacatagtgaaaccctgtctctactaaaaataaaaaaatgatctgggcatggtggcacacacctgtaatcccagctactcaggaggctgaggcaggcgaattgcttgaacccaggaggcagaggttgcagtgagccgagatcatgccactgcactccagactgggtgacagagggagactccatctcaaaaaaaaaaacaaaaaaaaaacaaaaaaaactgggagcagattctaagaggtcatcccgcttctcttttttcatttcttaagtcctctgaacacatcagtgaggtggaggcagcacattttaaaatatggggctttctctattccccatgagaaagataagccttgattgactttcccttacttttatcaaacttaagccagatacatctcaaagttccattttgtcttctacttcagcacatgtcctgtgcaggaaaagtcactggaattgaggaattctggagatacgtcattagtgctagcacatgctgataacttctagctggaacagggaagaggctggaaggcatgtgtctccagtgcatcccaaagtccagggaaccttagtagataaagatgctgacttctcttttctaaccatgcctggtcccacagaacccagcatcagcacttacgggtactgtatataaggcttcaagtctagatgttttatctctgtccttgattccctgatttttattcatgtatttttttcagttttattgaggtataattggtttattagtctgctttcacactgctataaagaaatacccgaaactgggtaacttataagaaaagacgttgaattgattcacagttccacacagctggggaggcctcaggaaacatggcagacagtgaaggggaagcaaggaccttcttcacatggcagcaggagagagagaatgagtgaaggaggaacttgccaaacacgtataaaaccatcagatcttgtgagaactcactcactatcatgagaacagcacggaggggaaaccgcctccatgatcccgtcacctcccaccaggtttttccctcaacacctggagattatggggattacaattcaacatgagatttgagtggggacacaaagcctaaccatattaattgatgaatacaaattgtataaatcaaggtgttcaacatgtttttatatacatatatattgtgagacactggctacaatcaagctagttaacacatctatcacctcacatagttacccttgatttttaattttttattatttcatacactattagaacaaaaacaaggtattgacttgggttgccatgtaagttccttagacacacatatatgtgcacacagacacacacacacacagtcacacactcccatcatccaatatcactgctattccattctcacttaaaagggcatgcagcttatttatttatttatttatttttgagatggagtctcactctgttgcccaggctggagtgcagtggcgtgattttggctcactgcaacctccgcctcctgggctcaagcgattcttgtgcctcagcctcctgagtagctgggactataggcatgttcccccatgtctggctaattttttgtactttagtaaagacggggtttcaccatgttgcccggcttgtcttgaactcctgagctcaggcgatctgcccgcctaggcctcccaaagcactgggattacaggtgtgagccaccacacccagcccatttaaaagttttttaccatcaaaaatagtgaggaaaatatcccacttaaaagggcatgtagcaaaagtatcactctactgcaatagaaataactaataggggaaactgagcatctggtgggaggaaggtgggacttccctgtgcttttggatcaatttttctgtaaacctaaaactgtcctgaaaaaaataaagtctactaatttaaaaaaagtatgtcaaatggcacagtcactatatgaaacagttttgcagctccccaaaaccttgaacatagaattaccacaagactcagcaattcgactccttggtgtataccacaaaactgaaaacagacactcaaacaaatacttgtacacaaatattcatagcagcattatccacaattgccaaatggtgtaaacaacccagatgtccatcgacatataaatggataaacaaaatatgcgatatgtgaatatgttgaatgcccctaaattatacactttaaaatggtaattttctattacatacattttatctcaaaaaagaaccaatagaggagcatcctacaaaatagctgaccagtcctcaaaatgaacaagattttccaaaataaggaaagactgagaaactgtcacagtcaagaagatcctaaggagacgtgactcctagatttaatgtggtctcatcaatggaaccctagaacacaaaaaggacattaggtaaaaaaataaggaagtctaagtaaattatagattttagtttgtaacaatgtattaatattatttcattaaatgtaacgtggcacactaagatgttagtaagaggaaatactggatggagggtacatgggaattttctaagatatcttacaatttttctgtaaatctaaactactctataattaataaagttgatttaaagaaaggagcagctacatgtgccttttgtgctctgtctttccccactctttcctccatgtatgtaactcggagcttacaggaggagccttgaggacaaggatgtacaccaaggatagtgagtgggaggcagaggtagccacctgcttcctgccctgtcccgctgtcttcacacttcttgttacatgagaataagaacataaaagaaaaatttaaaaaggaccattcttttaaatcaaatacattttgtttaattaaaaattcactgttaccatatgtattagtttcttaggtttttcatcataaaggaccacaaatgggttgacttaaagcaatagcattttattgtctcacagttctggaggtcagaagtccaaaatcaaggtgtagagccacgtgcccactgaaattctggatggaatcttttcttgcctcttcccagctcctggtggtgatgctttacctctggcattccttggcttgcagccacatcactccaatttgcctccgtcttcacacactgttctccctgtgtgtcttggttttcaggtagcatttccctcctcttacaaggacaccatcatgttagattagatcttcccccatctccccaacctgcccatgacatcatcttgactacatctgcaaaggccttattttcaaataagaccacattcatcaatatcagtggctagaacttcaacatatcttttgggaaacataattcaacctgtaacactgcatttttctcattctataatggacatatgaaaacatttttagagactagcatgggcctatggacaggcatttgggatgaatgacatgtgtgatttaaaaaatcttcacaactttatgaagttcatgaccaagacttactatcccattttgcaggtgatgaaattgagacataggaaatgtaagtcagtttttcctgggttgcacagttaggaaatgatggattcagaatttaaacctagactgtcctcagagttcttgctctttctatcaaattgttctcaggctgaatgagcttttagtgaatcagatcaggaaatacagaatgagattctgattggaggcttatcctgaaacattcttagcctcctttatattcatttaggcttttccttcctcgcttttcctgccaccgtcctcattgaactgaaggctcgcctcataaccacgcttgcaagcctctcgctccttctaccattgtggctttcaaatttgatttactgaaatctacttgtctaaatgatagaatcgagaaagcttttaccaagtaagtttatcacagaaatgtaactattatgtgtattgtgcaaaatggttcttttttttaaatccaggcaaatacattggagtcattaatttgaatactaagtacaaggttctgtttaaaaatccacaagatgaataacaaatcataattctggcaaggcaaagacattcttcaaagccatcgtttgtataatccattgaagatactatgatagtagctcgttgatggctgatttagagtctagcacacgtgccattacctttcttttgagatatatttcatgcgtcctcacattacaagcagttgctgacttcaaaatggattgggttacaaaagttcatctgaactatattctttgatattcagaatgtttcgcacatccttataaagcacctgttatgtgactatcttgcgcttggctgtgtagataaaacaattaaaaaaaaaacaaatagggtccttgttttttgagagtttaaatgggatgaaggtggtgcattgaattacaggtctcagctcttcactcctctttggacatccctgccctgagccccctgactttcattttcttgtatatagaccgtacttcccctttccttggctgtggggttgactgtgtgacttgcttttggccaatgaggtgttagcagatgctgcaagctagattttgccaagtgcctgagcagttgagcttgccctgtgccatggcagtgaggagtgcttcctccgggtgtttatgccctttaccctgagcctggaattcacatatgtgctgcccacaccccagctgctccaaggacctgcagcattatagctgccccagccaacccacagaaccctaagagagaatatatatccttgtcattctaagtcgctgagttttgccattgcatagcatgtttatggcaatagttaaatgatagaggtggggagaacgcccgcactacacaaagagttccaaaaaataaacctgtaatcactggggcatggtgcagacatagagtgtgttgagacacagagcagtatatgcaatggggcttctgagacatcaagaaggtctccccaagcaagtggctttcaagctaagacccaaagggtgagcaggaattggttgggtgaagagagaggggaaaggaatcccaagtagagggattggcacctgcaaaggccctgactgaggttggaataaatttggtgttgagatgaagcagcagctggtgaggggaccagataatacagggctttgtagaaggaggattttgaaatttattctaagagcattttattgtagaatcctagtacagtcaaccctctgtatacacggggttcccagacatactcaaatcctgctgtccactgtgtggaacctgtttataggaaaagttgaccctccgtagaagcaggttttgcttgtttggttgaaaaaaatctgtatgtagtggacctacacagtttaaatcaatgttgttcaaaggtcaactgtacatgagactcctgtggctggcttagcaaaccaaatttccccttaggggtgttcatccatgaggttattccgtttttctttgattactgctcctgcgtatgttcaggtgaatcttctctcccctttgggtagcacatcccttcatgatgtcttggacagattgcataacttttcgttcccttttagctgctaaaatcctatctggtttaaaattttaatcatttgttcacggtgaacattcccttcagttatggacaggcaggcttgtggctacagaaatgttaagctggggaccaagttatgatctatgtacttacttctctcactctcttaaacccttggagtggagtgggccacaggttgtgtggcggatgctatagggcacctcccagatccccttctggacaaaggacttgctgagagtgatgcaggcagatgttcctccgtggtcatcccactttcaggggtcctgcagctgaagagagacactccacctatttcctgggacggtctgcatccattgaccaattgatcctctaaccccaattccggatagctctgaaggtcaccccagcttcagaactccctgcagagttggctgaggcttgcactgtcacggcatcatagctcagcttctccctctgctcattctcactccctcacttcccttccactggcgtggttcctctcttagtcttcttgagctgctataataaaatgccacaggctgggtggcttaaaaaacagaaatttattttctgataatgctggaggctagaagtccaagatcaaggtgccagtaagcatggtttttggtggggactcccttcctggtttgcagatggctgccttccagctgtgtccttacatggtgtagtagtcaaggttctctagagggacaagactaataggatagacatgtatatgaaagtgaatttattatggactattaactcacacgatcacaaggtgaagtcccataatagaccatctgcaagatgaggagcaacgaagccagtccaagtctcaaagcctcaaaagtagggaggctgacagtgcagccttcattctgtggcctacaccactggtgtaacatccaagagtcccacagctgaagaactttaagtacgatgttcgagggcaggaagcatccagcatgggagaaagacagtggccagaagacttggccagtcttgtccttccgctttcctctgcctgctttttcccagctgtgctggcagctgattagatggtgcccacccagattgaggatggatctgcctctcccagtccactgactcaaatgttaatctcctttggcaagactctcacagacacacccaggaacaatactttgcatccttcgatccaatcgagttgacactcaacattaaccgtcacacatgggtttcctatatgcaggggagaagagagagggagctctgtgtttcttccttttcttacaaggacaccagtgttattggctcagggcctcagcctcatagttaaggtcatttaaccttaactgccttcttaaaggctctgtctccaaatactgccatattggtgattagggtttaaacacggaagttttggtggggacactagtcagtccatagctgtttcccaagatactcatctctgtctcagtctgtttctcaggaacccaacctaccatgagctgcttgtgcctctcatctggctccatttgctcagattgctttatggaagaaatgctaaaaataaaagggataattttcaaaaaataaactgttattaaaaaataattttagatttacagaaaagttgcaaaaatggtacagtttctataaccctcacccagttcctgtaaggctttcttctcacattaacaggatacatttgtcgaaattaagaaaccaacattggtacattactgtcaactaaacttcaggctgtatttgggtttctccagtttttctttaatgtctcacttctgttccaggaattagcccagataccacttttcatataaccatgtctctttaatctcccctggtctgtgataagtttcagtctttccttgttttttcatgaccctggcaattttgaagagtgccaattggatattttgcagaacgtcactccagtttggggttatcttcttttgtgcaattagagtgagattttgggttttagggaggaaaacggcagaggtgaagtgccttctcatcatatcctcttgggccacatgatgtccacgtgacatcactgggatgttagccttgatctcttggttgaggtggtgtttgcaggtttctccactggaacatttctctttttcccttttcatactctgcttgttggatgtagacaagcatcttttgcttaacgtgcttgtcttctctctggacattgcatctctgctaacactgcctggcccctgtgcctctcaaggcaggtgtccagatgctggctctcttggagtatctgacccagcaacagtgggtgacatgaagtactggctctggttcaacccatttagcttctaccctggaggaaaatgaggccaaaggaagttaaagacccagcgaatcagggtcaacttattgacttggtgtcaggtcttctgtcctcaatccagcattatttcttaacctgatatgactatggacatagggacagagaagtagatgtccaaggtgagagctggctcatgaggtgctggacagagcgtgtggtggctttactctcatgtccctgtcagcctcagcctcttgctcattggccaggtttgagtcatactttcacctccagaggcaggagttggggtcaacccaccttgctcacagggatggcagtggaagagggtggtttccaaagggaaatcaaggtactgtcctaggaggagcaaccgatgcccgacaggacagaacaacatatggccactacaggtgtgaaatccaagtggtgacagcaagaagttgggggtctctgtgactcctgggccactttgctggggatctttaatgcataaaggacacattgtatgtatacgagttaggctttgtatatgtcatctgagcctattctttcttctttgcattagataagtaaaagaaaataacacaatacaataataatactgcatccttgtatattatagaagcactttgcatattatagaagtccttttacacactcattctcagttgattcttgcaatgattctgtaaaataagcatcacagatgtgaatgtccccccattttacaagtgaagcaagtgaagctcagaaatattcagtcaattgcttgattccatgagtgccttgcttacttcccagtctgccttgcagtacatgcgtctgaattctctccccatgtatctgtccttctgtgtgccttctcatgccaggggcaggctagaaatgctgagccattaaggcccctagaaacagtctctggaccaatgatgaatgtgaattggaggttaaataccccagcttccttgctcctggagcaaagaaggagaataatacttctgaggcgtgtgctctagcctgtgtctctcagctcctcagctgttctcagtgtccgcatgcttgatcaggcaccctttcgggtgtccttccctccctgtcttaattccttgtccccctaccagcacttcctgggagcagctcccaaataaatgacttgcactcagatctttgtcttagggcttgtttttgggagaacccaacttaagacagccacagcatcacatagtggttgtatatttccactgtaagtgacagaaaccccagcttaagctggctccagcagaaaaagaatttactggttcatgtaattgaacagtccagtctaatagctctagcttcaggcatgattgaatctgtttctttaaacgatgttaccagtgcttgatttctctctttccacctctctgctctgatttcctctgtgttgagttcttctcaggcagactatctttccagcagctcacatgatccccgattcaagtcaaatggaaaagaaagcatctccctccaggaaactccaggtaatcctgagattggatctgattggctctgactgcatcaggtgcttacctttgaaccaatcactgtgctcagtgaggtataaatggccagatttgggccataaagaccacccaggaagctggtgttctggttggctgcacccagtcgcaaggagtaaaactggatggcagtcattattgagggaagatgttggggtttttttacagaaaagggagaatcaacactgttcagattgtcacctacaccatctgactcttcgtactttgaagaaaaaaaaaagtgctatcttctgagaaaaaaataatatattagttccatttaatttcaacaaaaatataagtcataaatgcctcactattactggatacgcttagatatagaaaagaagtaaaaactctaagaaccataaaataattgttttatagggcataaatcattccatgtttttttttgtttgtttgtttgtttgtttttgagacaggatcttcctctgtcacccaggctggagtgcagtggaacaatctcagctcactgcagccttgacctcctgggctcaagcgatcctctcacctcagccttccaagtagctgggactacaggctcacaccaccgtacccggctaaattttttttgtatttttggtagagatggggttttgttatgttgcccaggcttgtctccaactcctgagctcaggtgatctgcctgcctcagcctcccaaagtactgggattacaggcatgagccaccactccaggccaaatttttattgttttgtaataggattataggatatgacagggaagcataccatcaaagattcaaaggacagaaaaaccacatctaagaggacagtatttacttgttgaaggacagggaaagctggagtgggtggtgatggctggaggggaggccctttcaggcagttgattcaatgagtatggttgagttttcatgtggcagaaacttaagcaaaagtggtcactttcatttcttcccttacaacaatagtgtactacttaccacaattttattggcatactgcaggtaagtgaaatataatagcttaacatagctgtgcacaaactgtttcagtaaagggacagagaatacatattttaagcctcaagagccaagagggaaaatagagaatattaagtgggcacttatgcaacaagaaagaagacaaattttcatacatttttcaatgacaaaattcaaaatataataatcgagttcaagtttttgtaatacaggtctactaacgagaaaaaaaatagaattcttaattttgagaaaaccaggcacagtggcaaggtcctgtaatcccagctactcaggaggctgaggcaggaggattgactgaggccaggagttagaggctgtagtgtgctataattgcacctatgaatagccattgcattccatcccaagcaacataatgagagctcatctctaaaaaaaaaattcttattttgagagagataaataatttttcttaattgaagctcagttagtattctctatcatcaaatcaattgcgaacattcacctataaaaaccaccgttagcttgagggccataaaaaatacagtgggctgaattttacccacaggctgtagtttgctgacctttggtttaatcagaaagggaatttactgacttatagagttaaaaaaatagaggtgaacagttttcaaacagagctaattcagaactccagtttcatttctttgagatgacctttgttctgccctccttcctaggatggctttatcctgagactgggttccttcaaggatgccttaggaactagactgtatatttcatattcacatccaggaagggagaaagagtcacttctctgagcaaaggtcctgagcttcactctgataggagcaaagttgagccaagcactgtgccacggtgctaggaccaatcagggaagtgacttgggtacagatttcataggtgttatgcagtggaaggggcatagagtggagggggaagagagggaacatccactgtaagtaaactctgaagaataacacagaaaagagggagtggatgggcaatttttacaaagtgaatgtgctccacccttatcttgatgtctctgtgggagatcttgctactctggaatacctgttatcaggcgcatttttctcaaaacaaatggtaggaattgtcaaacaccaccttagtggtattttacagaggccctgtcctcagcacctgtggtcttattacttatattaacttcccatgaacaagtcttaacattctcctgagtgatagtctgccagtcctgcaacctctagctcttaaccaaaatcctgtattatccccttattcccttccttctcaaaagggatccttgagaagacatattcaatatccttgacagaatgattgagccatgaatcattttacatcttttagggtataagccttattttcttctatctatgcccatcctagtgcctttatgaagtggaaagcacacggaggggttctgctttttctcgtctccagtagtttcttacagaccagtagcactgcgtaaggtaatttggaagaactaaaaaagaagtataagcaacaattctacagctatcaccatgagaatatgtagaacacagatcagcaaactatggccctcaggccaaatccagcccactgtgcttttgtaaataaagttttattggcacacagccacacccatccatgatgtattgtgtatgaatgctttcatgctgcaattgctgcaatggcagaatttggtaacagaaacctggcaacacaagttagggcttatatgtttctcttatcacaagaaacctggagttgtgtattccaggcatagtacaaaggtttcctgattccatcaaggaccctgggttcttttcaccatccttggtgtatggcttccgtcttcaggcttttggcaacatggtggctccacctctagacactgtgcctacattccagggaggcagatagggaaaggacagtgagcagaagttatgtgtcagctgatttggctcatttttataaaaaaatacttttttagggcttcccagaaatccccacccagcagatttccaattacatttcgttgggcaaaactatatcacatggctgaaactagctatactggagcctggggaactgatgtttttggatttccacattgttctcttgttcattgttcattgttttgtttttgtttttgtttttgttattgttttgagaccgggtctttctctgttgcccaggctgaagcacagtggcatgatcatggctcactgtagcctcaaactcttggactcaaggaaccctctcacctcagcctccagagtagctgggaccacaggcatgcaccaccacactcagctaattttttggtgttttgtagagacgaggtctcactatgttgcccaggctggtctcaaactcctgagctcaagtgatcctcctgcctcagcctcccaaaatgctgggattacaggcatgagccactgttcctggaccccacattgctcttttaagttagatgagaaggtgaaaatggataataagtaggcaactacaaacatcttccacaccagggactcacaaatccaaatgcctacaaggatggcaggagatttaaatgggtgctttatgccactggagacaccagaaactggtaggaattatgatgaagttgagagtacccaccctacctacaattattcaacttcaaaatttcctagaacaatcatctatggaccttgagcttttgacatcctctttggataatgcttctcacatgagctagtcatttgaaaagtgtatttcaaggggtcagccattgattcatttattctatagcattctacaaatattcatttaccactcactttcttctggtgttccagactgtggtctgtggctctccttgtgcagttattaaattcagaaaccacaaatcaacatgcaaatcaaaatttgtttaggctaaataggtaatgtgtttgcacattatatatgactgttttaaaatgtaggtggaggcctttgtgagtcataaaatagaaattcattgaacaaaagtacccctggtttcagagtagctctctgtgatacattttctcactcaacagatactcaaaagcataagcactattgtgagaaagtcttactattttttatattaaaaaattctcatatgacaaaaaggtggaaaaaaatttgctaggtactgggggctacggaaatggtgagatgaatatgtcagaccctcaatttttagaaaactcacagcacagtagggataaaaaatatgaattaggtaggactcttttggttgcaagtgatagaaactcaatttaaactgacttaagggaaaacaaagaatatactgaattatttgtctaaaggttcagaattgggctgggcacagtagctcaaacctataatcccagcactttgggaggccaaggcaggtgatcatgaggtcaggagttcaagaccagcctggccaagatggtgaaacccccgtctctgctaaaaatacaaaaattagcccagcttggtggcaggtgcctgtaatcccagctactcaggaggctgagacaggagaattgcttgaacccaggtggcagaggttgcagtgagccaaaatcatgctactgcactccagcctgggtgacagagtgagactctgtctcgaaaaaaaaagttcagaattaagcacattcttcgctcattcaggcatgcttggacctagagtctaaacagtatcttcaagatttagtctcgctccatttcctggtttttcctttctcaatgttggattcattttcatgctctccctttctccccagtataaacaaaaactgtccaagattacagtattgtagctccaaacaccttctaattctattgggaagagatatcaacctttcccatagctcctctgaattaactctcattagattaatctttcaggtgaatcagttgctgtggcaagaggaatgggagatactaatgggtcagattttgaatatgtgtctcatgtatctgggaggagtttagcaccaatcaatccacatggattgatgatggagtctttggggtttttaaggagaaataggaatgttattatgagaagaaggaggaataaatgctggaaaggcaaaaaacaacagacactcactagaaacaaaccaaaatcaacatccccgaggaagaaaataatgaatgacaccagacagactcgtttgtttcattcagtgttttcttcaataaacatttaccaaaatttgttattttagtggaggttgttgattgccaatatctactcccaccttccattcctttttttatcttttttttttttttttatcagaaccattgactttgttcaactatccccccttgaagtggctgtgtttgagagaaggctgctccatttccaaacccaagggcaagtcttgactatctaagccaatcctctcagtgccatttccgttgctgttgatttgtttaaggcataaacgtaagtagaatttgaggcaatgaaatatgaagtcaccagaaagcttctaggaaggctattcttgctcttaaaaaaaatacagttaggggtcctcaaagggagctaacttgtagacctactctacatgagataaatgtggaaatagcatgggctcttggataatgttgctgaggaaattaatgactctagacatgaccctacctctagatttctagttgtataagaaaattatttctatattttgagttacattgggcttttgggttatttgtaacaaatgtacttcctataaatgacaggtccagggccaggcattgaggataagaaatcgtaggatgtatgccctctattcatatgatgcttccattttaatcagctggaaattgttattttttcccactttattctacttctttctctctgtgaagttaacaaagtacccaaggggactggatcaaggaaaacatgagggcaaactcaatatgttgctctcaaagtggtccctgatcaaatgctctggccttgccaagagaatcaggagcccttgaagcaaatatgtcttcttccccagaaacaaaattcaaagtgtgtggccctgcacttgtgggtcaggaatgccatcttcacagacaaaggaaaatatattctcctttattcccatttttaaaaccccaattacgggcacaatgaggatccatggaaccccacgaacactaataaaaataaagcacttagctcatgcaatcttgtctttttattttcaatatcacttacaatgtaagctttttacaaaatcaaatcctttctcaccaacgatatgattttccctgaaaaggctttgaagtatcccgccgttactacttctgtacacaaacattagcagaagccctgctaggcaggaggacaaaaataattgttcagtcttcattttaatttaaccttttgtaaattcctactttacaaaagttccccttgacttactggcatcatattgagaaaatttatgaggtagtccattcttgttaagacagcaaatctccatgaatcttttcccccatgaaagactgtcctggacccttcaccccttttaatttaggcatcttgctctctttctttaccatttgcatgggtccctttgtcaccttaacattattgtctaatggtttctgtacaattaaggcattatggaggtgaacattaatatgtctcagaaaatttacgaaggccatatatcttgatgtttgcaaaaggatgtgccagagattggctaggaatgccggtgctcagctcttccagctgatgtaaggaacggagttcattatctgtcatattggtagtaggacagaaacaagacctttggcaggaaggtgtgaaaagggaatgagtagccagcctggtgtaaatcaggaggggaaatacaggtttaagctattttagatctggtttaatagaagagtgactaaaaaggtgggatcagtattcacattgccctgtgcgatgattaatattgagtgtcagcttaattgggttgaaggatgcaaagtattgttcctgggtgtgtctgtgaaggtgttgccaaaggagattaacatttgagtcagtggactgggagaggcagacccaccctcaatctgggtgggcaccatctaatcagctgccagcatggctaggataaaagcaggcagaggaacatggaaggactagactggctgaggcttctgacctccatcttcctcttatgctggatgcttcctgccctcgacatcagactccaagttcttcagcttttggactctcagatctacaccagtggtttgccaggcactctcaggcctttggccacagattgaaggctgtactgtcagcttcactactttggaggttttgggacttggactggcttcctggctcctctgcttgcaggcagcctattgtgggacttgaccttgtgattgtgtgagtcaatattccctaacatgctcccttttatatgtacagctgtcctattagtcctgtccttttagagaaccctgactaatacacaccatttttagattctcactcatacccgctagccacctgccattgttttatagcctctctcttcttcagtttcttcatttgtaaggtggaggtacatttagaacacaaccttaagtccataccatggcctaccaggttcccgcgatctggtcccaccttggtctcaggcctccagtgccttcctggctttcctggaaccctgggcttccaccacgttggtctcctttccaactccgcagtgtaacgacagctgcttcccacctcaaggcctttggccctgacattacttcctcttccatgaaatacttctccccagatgctcaagggtgggctccttctcttcatttatgaaccaggttaaattggactttctcacatcgtttcccagaggcagacttgagtagtttatttagaaggtgatcccgggaatcagaggaatagagaaggaaggagagttaagtcaaggtgatattgatgagaaattgatcactgcagacaactggaactcaattctgcagggagtttctgggagacagtgtgaaacctcctccgagttgtgctataaggggctgggaagccgtgatggttttccaccaattcccgtcctctgcatgtggaggggcactcctggaggggctcattatttggcacttccagcctctgctcgtacagattgagcgtgaatctcgctgcattacagaaggctctatggcagagagatgcaggtgctaggggtaggaagctctcgaagcgcaagggaactgcccagcagggtgccacttgggcgccatgggtgtgacaagggaatatgtgcggggagctgactgtcctctggagtcctccattgatctctgttccttcatcccgtccatggccttgaaagcacttactacaattgtgaatcatacccttcttggtttgtgtatttttttaaatttattttgttgttgctgtttttgtttgtttgttttttgagacagggtctcactctgttccccaggctggagtgcaatggtgcaatcataggtcactgcagcctcaacctcctgggctcaggtgatcctcccacatcagcctcccaagtagctaggactacaggtataccccactatacctggctgattttttatattttttgtagagacaaggtctcgttatgttgtgcaggctggtctgggactcccaggctcaagcaattcttctgcctcagcctcccaaagtgctgggattacaggcatgagccactatgtatttgtgtatttgctaaattaatacgtacctatttgaagggtctcagggaacagagcgatgtttgaatgttcttgagtgtttctttgagtgttcttgagtgtttctttagtgatcagcaaaaaggtgataatcaaagtatttaagcacctgaagggcagggttgtcgatcatccaaaagttcacccatcctgctttgtggtaagtttctggaagtaaaattgctgtgtctaagatacaatgcttttaaagcagggcatgcctttgttagttacattttcgagaatcttcataaacccaaacagtacaggtttaaagtgcaggcatggcatcaaattaaattctgaggatctcaaatatgagggccttggtaatgaacatgaaaaatcctttttttttttgaagctgcataagcaagatgattttgaaagtttaaaaacgagtgtgtgtatgtgttttgtgttccactaaaagcccatttaaaacctacttgagtgctttttcatttagtttataagtattcagaacatcagaataaagcctcaggtttagggaagcctctaccctctccagctaggctgcatgactaaaaaaaatcaaaaaaggaaaattttactttgacaaatataatacctacattgggaatatgcagacaagtttttccctaaaaggttaactagagacaataattactttctccagagatcaccaaagtgacatgctgctgtcttgatttcattgctgttttgtgatgtgcgtttcttgccacttataaatgaaacaaatgaggttagatggcaaagattatgaaaggaattagcaataatgagcctgggaacaaaaaaacattattatagaaaattgagttgacctcactttcataattattcactttaatttttttttgtagtgtaatttgaatgaaattaaataatactaatattcctcctgccactgacaaggaatttcatgtaaagattaataacttttaaaactaaagatttggctgccatcttagaggtcactgttgctattccagggagctttctgtcctctacatgatcctgaaccgcctatgccaaaaccacaattttctcctcaaagatctaaggtcacgtgactctgtggcacaggaattgcatctccctccaacctccgtgagattcatttctctcctgagattcacttctcttacttttcccaatttctccatgagaatgttctcagtaaatcatgctaatgtgtgatggaagcagacattttcagttaattgggtgggcataatttgaatttgaaatatataaatttttcatagggcactccttgaagacatcacactcattaagttggggtttgaaggtgaggtgagtcaatatagaactttctacttgtttgtaattttggccaatagtaacctgaagatgcactgaacatgtatcatgtaatagacactgagtcaagtagttcacgtgtgtcatctaatttaattctctctgtggccctataagtactgttgtcttcgttgttctgcagatactgcaactgcaactcaaatacattgcagaggtcaaagaagggctgactcaagatttgaactcttacacctacccccaaacctgagctcttagccaacaagatggaatcaaagcaagccaatcaatagaaatattggtgttgacatccgatagtctgtgatccatctctgctcactcacttaatatctttgcatgtaactctctcatttcgagtttacacttagaaaactgaaataataacaacaccaaacttactgagttgcagtgactattaaatggggaacatagtgaagtaccttgaacactgatgaattacagtgatgctcaataaatgttgacttttctccattacttatggacacttttctttctaaggcttggaaagcatttagcacagtgtgtggcacagggataccagtcagtaataatattagctaaccgtttactggtacctacaatgtgcttggctccacattgcatgctctgcaggtggcatctctctaatcctcagcagtgtcctgtgctgacggtgccatgtctgccctcattttggagagagtagctgggtggtttccatctggtaagcaatggagttggagttcaagctcagaatccaagctctgagtcagcgattttgccagctgctgtggctcatcgtgttgtcattaaattcgatgagtctaccattggcttgtaaatgtctttccatttcatcacacctggaatgatcactctctctttcgaacttcaatggcttttactgtctatctaaatcagtaggtaataaatcatggcctctagttcattatggcctcccatgctttcctgaagtgtttaaatcactattgcctttgtttgttcattaatttggtcacccagtcactcagcaaacataattgtgtgtctgttatattccaggcactgtgggagattctgagggtacagaggagaactgaagagacttggtattcactaagggaaaagccaaacttcaaggcgacttaaacctttatttggggggtcctctttaggaaaagaacattaaattacatacacacagttagattcagggccagggaggaggtcttgcaagtgaggggttctgaaacataagcttcattagcttcgtggtaaatccactacaggtttccactgttacggatcttagaattctagattctgctgtaacctcgatataacagggaggtcctgcagccctgatcactatccacagattaagtcaaaacaaaacagagcataaatgtgactacaaaccatgagggattatgaaaatccttactgcagatttccccgagggagctaatctagcagccaaaatgacacggtgtgccatacccaaagattcctaaaagtcattttccctaaaacgtcgctatctctcaccctgaacctcccattaccctcaccatcctgctgctctgttttccactctgtccccggcctaacactctttaaaccctggaaaccctacccctgactacgtgcgcaccctaaactggtgtgggctagtttctactatgaatgtttttgtagacactgctagaattcactacaacctccttcacacagacatgcagaattctggagaattaattctccactgatcaccccccgtttaaaatttttcagttttatgtatcatttcccaaactaaagcataagagatttgatggcagagactaatttataatttttcaattttcagcccaattgggacccctcccaggccaaatattttgaaattgaggtagtaattttaaaataacaattataatgaggaacaactggcaattctattttaaaaaaattattagccaggctcaaaatttcatcctcagtttggtcatgaagttcaggcttggagcaaaacgagattaaaaataaatagcagatgggagaaaattatatgactgttaatctaaatgtttagcatgttggacccaagcagtgattctcaacccagaggacacatggcaatgtctggacacatttttggtcatcaaaactagggaaggagggtgctactggcactagtgggttgaggtcagcgttgctgctaagcatcctacagtgctcagggaaggcccacgacagagagttagctggccccaaacatcaatcatgttgaagtttttagatcctgaaccagagaactcacagaaacaagccttacaccaagtaactaattagccagttacataaacaactcatcagttaactaaccaactaattaatgatatggatctcttttgactgaattgactcaagttttctcccaattaataactagtcaattgatgagtaaaataaccacattttataaagttggcctctttgtttagtttgtttatgcatgaagcgtgcatgactgtgtgtgtatgtgtgcatgtgcacagtgatagtgtatggcaaagtaatcacttcttttccttatcctgaaatgtcctgcatgtttatatatcaggcataaggttggactgactgtaaatggatgatctggcttaatctcactacaacactgtaagtgggattaaccccactcaaagatgataacctgtggtttaaagatcagtaacttgtcaaagataacatgagccctggtaggtgagagagacatatctcagtctaggctgtctcagccccaaagcccatcctcttagctaggatctctgaactatcacttattccacaccctcttcaatgatttttgcatatccatgagatacctgcattattatttttctgatttttaaaaatttaaataaatttaaccttactctcaacagtaacggcctggaatcatgggttcagcaccctagcatactttatatttctaataaattttgaggaatcactgctttaacaccacaatgttaagccacccctcgcctatttcaaaatgggtttttaatgatcaagcactatataagtggaaattattgtaataattgattagttaatccacgtgagggccacaaagtactctctagaagaagttctgagtggccaaattaaggtaagatcagcaaaataaagagtgctgataaagaaaaaggattaaaggaaaatgcttctaaggagctcctgtgattaaatgcaatcgaaggagaactcatgggttaactcatttctgccgagcgcagttacatagtgctcagtttgataaaggaccctgcagtagctttcaaatggagaaatgggaattagtggcattccctctccaattactaattttacagaaatgcaaacagctcagcaaagggaacacattgtccgttccaaggctttccgtgaacaaatacatttgatatttgagacagcaccctgtatgaaataggccctgattttcaatatacccttgaattcttttatcttgttgtcaataggtttaataattgattgtggggaaaacacaatagggtaagaaaaataccagggttatctcaagagttctggaggaatgatttgtgtcaaattaggtgggtagttttttatttttattttttatttttccaattatatacagtgccattcacaagctaaattctcactgatttaacctctttcttctctgttccatttagctggaataaacccctgtggccaatcttctatgaatgaaattgtccatctttcctaggaatgagtcaatctgtgtatttgtgaatttcaaatataagtgtgactactatggtagaaggaaatagctgtcagaataaagagaaaaggagatggattttccaccttgtcatgattaacacactttctcagtcgttcttggccagcatttgcaaatagtgactgttgtggctaattggagtattccttgcagttttctcatgtcagcttatacgagccaacataaagaaatacctttgtggactagatgcagtcatctcacgctttacagtctccatcgttttgatccccccaatagccctgtgaagtaggaaagaggtgtgtcttggattcccacagtgtcttggatagctttgttatggtacctactgcattataccgaaatttagtatttattgtgtgctttcccaacagcactgtgaccttttgcaaagtgaccttccttagggctttaaacatagtaggcattcgataaaccttcactaagtaaatgtgttgttctctctctgaactgtgtttctagagcagtggttttcaacagcggtggtgttgtcctcaggggatatctggcaatgtctgaagacctttggctgaggtgggggtggggtactggtggcatccagtgggtggaggccagggatgttgctaaacatcctacagtacacaagacagtccttcatgcaaagaattatcccaccccaaatccaaatgtcaatagcgccgaaagagaaagcctgctttagaggtatctaatacacacccaaaatgggagatgaatttcctgtgacactcataaaacattagggtctcacccactggcatcagcccttctaaagctctgggaggggccatatgattttgcccaatttgcaaatgtaggtggctacaggaagcttttggacatgtctaaggggatgccctagaatttatttggtttgtctcatgtggaacacacatatggggttttaggtgactttgcgtacagtaaagttactgctcactttactggtgtaggaatgacttccagaatattcttaatgctcactttgccatctctcccagcggatggtgatacaaaggtgaaggccagaggctctgtagggctacgtgtgttttctaggcacttaacactcaatgtaagtgggtagtggaggagacacaaagttaaaaatatagggagccaggctgggcacagtggctcacacctgtaatcccagcactttgggaagactgaggtgggtggatcacctgaggtcaggagttcgagaccagcctggccaatatggtgaaaccctatctctacatacaaaaattagctgggcgtggtggtgggcacctgtaatccaagctactcgggaggctggtgcaggtgaatcgcttgaacccagaagggggaggttgcagtgagctgagatcatgccactgcactccagcctgggcaacagagggagactcagtttcaaaataaataaataaataaataataaataaactatatggagccagaagctagtttgcgggaagtttttccattcaccaaatgtgtaaactgaagtgacggatggatttcccattgatgccatggcaaaatagaatttctttcctgtgagaacacatggacacatgcaagggaacagcagacaccggggcctaccagagcgtgaagagtgggaggagggagaggatcgggaaaaataactaatgggtacgaggcgtaatgcctgagtaatgaaatcatctgtacaataaacccctgtgacatgagtttacctacataacaaagctgcacatgtacccctgaacttaaaagtaaaaaaaaaagatttctttcctgtctgaaatacagttgataatacagtgtatacaattatgaaagcaccacatatttttctgttttttaaaaaataagccgaagaaaatgtgccagaattcctgaatcgtagggcatgaacctgtggcagcagtgggaaggcaagtacatctgtctatgaagttacatgttctacgtataccaattatcaataatatgaaaccaattttaattaaccatgttagaggaaggtctgaatttctttactatttcttatgaaaaatatacaaaaagtatcataagaaaagattatcaaattttagctgacgtaaaatgtggaaaagagatctattatggagttatatcaggcagttaactaatacaaactgttgtgtttttttttttgaatcttgtgatgctagtggtattttcagtttttagtacttgcaatttgttaagattttattttaactctaaatacatgtacacttctgtactgaattttatattcttgtgttattgtgcttaattagaggttccaaattgtataagctccaggagctgcagacgggtatcctctggatgactcacacactttgatcaccagagtagacctttcctgcaagctcctttgagtgttagactcatattaaatcaccttgacatcagctctgggatacctcagagacatctccaaactcagtatgtccaaagtcagtcttatcataaactccccctgcctcatccaggagataataaagtttaaaaaaggttgtaagtgtgggtctctaatctgatagggctggtgccaatgtaagaagagatagaggccgggcgcggtggctcacgcctgtaatcccagtactttgggaggccgaggtgggcagatcacgaagtcaggagatcgagaccatcctggctaacacagtgaaaccccatctctactaaaaatacaaaaaaaattagccgggtgtggtggcgggcgcctgtagtcccagctactcgggagactgaggcaggagaatggcgtgaacccgggaggcggagcttgcagtgagtcgagatcacgccactgcactccagcctggggacagagatagagacaccaaagatccctctctctctctctctctaccctgtgaagacagagcaagaaggtgaccatctggaagggaaccctcacccgaaacagacttcttttggagccttgatcttcagctttccagccttcagaaaatacatttctgttgtgtaaccttcacagtgatggttatttttttttatggctgcctgagaagactaaggaggttgacccaaagataccagatcctaatatatgggacccatagatgttatcttatttggaaaaagagtctttgcagatgtgattaagaatcatgagatggggagataaccctggattacccaggtgtgccctaaatgccatcgcaagtgtctttatgagagagtgatagagggaatttcacacacacacacacacacacacacacacacacacacgagaaggcaatgtgaagatggaggcagagatttgttatctggtcacaaactctggaactgcagcaggtagggaatatatgcttacttgagacctctggagggagtgtgaccctgccaacaccttcaggtcagccttttcctccagaactatgggagaataaatttatttcagtttaagacacgaagtgtgtgggaaattgttacagcagccacgggcgacaaatacagaaagaattcgtatctttttcattgcatgtatttctctgtgattcttctcactcttgcgatggtaagaaattaatggtctagattaggattggctattgaggaaagggattgagagaagctgtggacttatcttcctatggggttttgggtctaaactcttgaataaagagtacatttgcttagagaattctgatgctggtaatcactacttgagaacctaataaaatttagggtaggtggattcagggccctgggtatctttaatgtctcccatatcaataagatctcctgcatatagagagtcagttattgaacaattccaaattttaggatcataggtgacaaatcagatagaatgttcagtcttcattacggtgagtggggttggggaagtgatgtttgggtggagaaccaaataagatgagaaagcaaacttagaggaagtgagtttcaggcagaggagactgtagccacaaaggccctgagtctggaactattttggcttatttaaggaatatcaagaagtccaaaatagttgcagttcaatgatgatgttatattatttggtgcaggtaggtttatgattatagtgtcttctttggaaaatatgtcttttactattacattatattcctccttattcttttatttaattctaaattctatcttgtttgatgttaacattgatttcctgtgttgtatatctttgcccatatctttatttcccaatttttgcaaaaaattagtttgttaaaattgtgttttttggtaaataacagaataacaaatatctaaggtaaattatgtttcatttctcctatttgagaggtgtaataatgtgaattttatttagaaatattttcatcaaaatttctaatgtggacatgccttggtgctaagcagacacttccattatctgaacataacttgcatatacaaaataactcatttccgatgagtttcagtaattgaggtattattgcacatgtcattcaacatcttgaaattttagtatctctacatgcatgagcttttaaaaataaagtcatggctctattgggccacaaagaatacacttaaaatttacaatgtcagcaaaaattactaatttatttatttatttttttgagatggagtctcgctctgttgcccaggctggagtgcaaaaaattactaatttatttaactaataacaatgttgttttttatttatgcctatagtcacaccatcagtatggcatatgtttgaattgttccaatagtgcagatggagttactgtgatttagcaagactttctcaactgcacttatgaccaatatgatgctcttgggaggggcccagatgtggtctagatggtctgtgtctgtaggaaggaagtatcaagtttcagcccataagggaattgaacccctgaccgtggccttattagcaccatgttctagccaactgtgcttgctaattggtcacacatggcaaaaattttggagagaaggaaaagatgtcagaacacaggatccttggttttaacatgtttgtttcggtctgataaaaaaaatccttagatttggggtcagatctagcttggtttgagtatcagctccctctccttggttttctctttgaacaatgaggataatgaggccaattttggaagatttttttttaaatgtcggcgtaagtaaaataatttacgtgggaatacctagcatataatgcagcacaaagtagttattcaatacatattcttttatagtttggtttaaatcatttcgaggtaaactgatgatgcagaaaatcacaacacttctccctcacttagattataccccctctctttccaccttctgtcaccttcagtgatacaactaacatgctaaggcaccattcagttgcaaagtggttatatttatgcaataaaaataaatgcaaggcagaggagagccacattactcaagagtttttagtctgtttcgtcctggcttgagcacactgagatgaggtgaattcagcactccaaccctcccaggcaggggaagcctcgagagaaggcagcagaggatccaagagagcaagtcttcaagactgaccactgggttttaagtcctcactctgtagctgtgcagccttggggcaagcatgtaacctctcaaacccttggttttctcatctgtaaaatggggatcgttaccgttactaccccagaagattttgtgagatgaagtgagataagaccggtgagtaatttaaccagacatatgggaagtgttcaaaagtgctcaggggaaggtcatgtgtctcatctgcataccatgcactttatgaccagggctgccttttttaacttctctgagtctctctctctctctctctctctctctctctctctctctctctctctctctgtctgtctctgtctctgtgtgtgtgtgtgtgtgtgtgtgtgtgtgtgtgtgtgtgtgtgtgtgttttataagcctgccccaacaagcctatttactcagaatgtaaaacaaatttactgtagtatatcgactaaatacacatcgggtatcaattttatttgttgcaggaatgagtatactgtgtgagtctcttaaaaggttgatactctggtttcagcctaacctcagccttgatctgaatccaaggtttctaagcctctctttcttatcccctggctctaccctttaattccgcatcaaatcgttctcttcggcagtcttaccccgaatcagcggtgttgacctcacatggaatcacagaaccattcccctcatttcctctccctgtttttcgtattcaacctctgttgacccttcccaggtgttactcatgtgatgtattctgtaggctaagtcatttccccgcgctgagtttcccatttatttcttccactgccaaaatgtctttttccctctgtatccttcacaacccctgtgttgcacatctatcacctttatatgtgtcctgagccttgcgattctccatctgcactcctgatcactttctcttcctcactctgagcccttcattctccgtgttgagtaaacattcttggcctcaaggagctttcatcggcaatgctaatattttaaatattatgattacttttctctctgccataaaaatctcccaaaacatccatatgatcagtgtagaacactgattctcagtcagggaggggtgattttgcccactaagagacatttatagttgtcacaactggtgggggtccttctgtcttctggtggggagagaccagggatgctgcggaacaatactccaaagcccagtacagccccacaacaaaggaatattcaaatgccaataatgctaaggttgaaaaactctggtatagattagaaagtgtatttatcttaaaaagctaaaatagaactaagacacaatgcaagcataaggatagttaataataaaacaataataactcaaatgtatttggcatttgtcatgtagcaggcaccgtgccaacagttttcccttctttgccttatttgatcctcatgattaccctataaggtaggaactattatgatcccccttgcaaatgataaaactgtggcccaaataagttaaattatgtaactaaggtcacacagctgattaaggactaagctgagatccaatcccaggcagccaaatgggaagggcttctttattttgaactgctgtgatgagcactgatacatctagaaacagatgtgccatatactgcagagcgaggatcctctaactgaggtctcttggataggattccggaggtctttgagccccctggaaataaatgcagtatttccatcaatgtgcatttttttttttttctgggaagggggatgtggttcaaacagtcaaattatctcagaaagatttgcaaccagaaatacactgggaatccatgaacagcttgctcttgactttcaggaaaggagaagttttgtgccctggattaggctgcctttctgcaaaggtgggctcaaaaattctgaccagactatggaccatccttgattaaacttgataaatcatttggcaaccttgaatttccaaggactgttaaagggcacaaagcaaatttaataaaaatcttaagaaatggggtgaccttaggtgatctatttatataagattaggaaatataatggcttcaggtactaacggtttcacagtattgacctatccatgtcacaggactctttgcctgggtgttgctgatattttcctctgtgattctcactgtccctgaattcgtggctcacctagtcccctacaaatttacgtatttgcttatctgtgttaataccttcaatctggttacctccagctttgatggtttaggaatcacattgatgcttctttacatatcgtaattgattacatctagcatctaggacatttttttaacacccatcttatgtgtatcaactttggtaaacattccctttggttgcagtcatttgttgactctattttccttattgataatcttttcagctgcaaatgatgatatatctatttcctttcaaatccttagccctctaattagcttttctttttttgatgtattggctgggaccttcagaacagtgttgtaaagtaacagtgatgtgcatgcttgttttattgttagctttgacagcaaatcttctaaattttcacaattgctacaaactgaatatttatgtctctccaaagttcctatgttgaaatcctaacccccaaggtgatggtattaggaggtggagacttggtaggtgattaggtcatgagagcagagctttcctgaatgagaacagtgcctttaaaaaagagatccaggctgggcatggtggctcatgcctgtaatcccagtactttgggaggctgaggtgggcagatcacttgagcccagcagtttgagaccagcctggctaacagggtgaagccccatttctaccaaaaaaaaaaaaaaaaattagccacttgtggtggtgtgtgcctgtggtcgcagctactagagaggctgaggtgggagaattgcttgaacccgggaggtggaggctgcagtgagctgaagttgcaccactgcacttcagcttggggtaacagaggagactccatctaaaaagaaaaaaaaaatccagagcttcctttcccgtttcaccatgtgaggacatgtgagaagatgatcatctccaaaagagatgcaagtcctcaccaggcaccaaatctgtctgaaccttgatctgggacttcccagcctccagaactgtgagaaataaacatttgtagtttatcagtcacccaatctatgatagttcgttgtagcagcctgaacacactaagatcaccacttaaaatgatgtttgttattggggcttttcctactaaaatttcttctttccagtgctatgttgctaattccccattattgtaaaaaatcatttaaaattattaaattttatccattttgcatctaccaaggacatcagatgacttttaactttttatttctaagttgactttgcatttttctgcttttatacatgatgctgtggtttcccagagaacaatcatatttaagggactttgaagtaggaggcattcactgtcaccacccatgggcgtcctacagctacattcaatatgttcttggaaatacatgggctacaatgtaatgactactcaaaatattgctaacatgacctacttagacataaggtagggaagaaagaatatttagcattttccataaatatatatgtctccagatgtacctattcacagggagtcagaacaaaacagcattatgaaatgttccatgaggtctccagggccatacatcaactgaactcagccagcagcatgtcttcttcagaagtgtatctttagtctttgagactgcccatgaccaataaaagaaacgaggaaattttatgatgaagtttatttttccaatatttttccaatattgaaataccagaggtccttgcttccagtaggcacaaatttcagttactgtgttttaattaaataactccagttccccaacaatgtgggtcaatttttagttaccttgatatattacctgtaattgcatgaagcacaaatttccctgctagctcttcagttcataaatcactaagtaaataacacatgcacatcatgatctgtgactgatcatgtcacttcttcgaaggcaatgactggtcagtacgcatctgtactcagttcatacacagacagcaaagcatgaagttgtgtcgtctccttgtctcccagtgattaaaccatgtgacattttataaaagtgagtaatactggtcgggcgcatggcttatgcctgtaatcccagcactttgggaggctgaggtgggcggatcacaaggtcaagagattgagaccatcctggccaacatggtgaaaccccgtctctactaaaaatacaaaaattagctgggcatggtggtggcacatgcctgtagtcccagctactcaggaggctgaggcaggagaattgcttgaactcgggaggtggaggttgcagtgagcggagattgagccactgcactccagcctggcaacagagtaagactctgtctcaaaaacaaaacaaaacaaaacaaaaaaacaaaaaacaaaaaaatttaaaaaaagttagtaatcctaagataggattagcaacaaagataaaagtgcattaaagaaacaaaaagtggtagtgctggaagtgaaacttgcattgaacctaaatggagttattgaagaaatagctgatcgtaggaatattgatgctgctgtggttggaggctctaccatgcagctggaggaacttcaaggaagcgagcttatcaaaataagtaaggaaagtggttgtgacgaaaaggatgaagatgtcccagaggaaaggatgctggcaaaaactgcacattaaagggattctcagagataactgacaacattgaaagatttacactcaaggtttggaaactgatttaaagttagaattaagtataacgattcacgaaggtgtggagaagatgcttgctttgtctcataagttctacaatgttcgaacaactcttgataagtttttaataaagaaaaaaacttcaattttcaatgtttctaatttttaaaattgtagtgtactaaagtattagttttactatttttatatttccctacttataagtgagaataagtgactttttaatgttttgacaaccatttttaaaggtcacagaacaactgcaatttttaccactgattattaataatcagatgtttttgcacagttgtagcctgcacagtcgtttttatggtcccacactactctgcaaagtgaggacagtgatataattttctcattgaagaacacttggaaaatagagcaagagaaaaaaattacatataaccccatcccaaaagcacttgtgagtataaaaatgtatatctttccaatagtcattttgattggtataattttacatctgttggttttacatacttgtgatcatgctgcttaaagaattttgttccctttttaaaaacagactttactttttagaggagttttaagttcacagcaaaattgagtggtaagtacagagagctcccattatacctcatatccccacataagcacagactcccctaccagcaacatcatgcaccagagtgatacatttgttacagtcaatgaacctacattggcacatcatcacccaaagtccatagtttactttagggtttactcttagtgacgtacattctatgggcttctaacaaatgtatcataacgtgtatccaccattatcatgtcacatagaatcatactgccctaataatcctctgtgtctttgaatttattaatctctgtctcactgagtaaccactggtaaccactgatctttttactatcttcatagttttgctattttcttttatatattttttgatgttaatatataggttttattaattcatctgcgtaataatccattgagtggatacataatagcttatttaactttttaagtgaattaaactgagttgttacaggttttcacttgtttacggtttttcctttgctattttgcattcttttcatagggtcaatttcagaagtacagccattaggtccaaagtctcagccaatgtatcgaataaatctagcctgcagacaaatttggcctggccagcatatttgtttatatatacatatatatattaatggagcccatagttagcacagtttacatacaaatctgaatttcctattttccttgaaaaaaaaccaggagatctgttgacaccaggtgtttccatatgtcagcaagaagctggacctgtgtagctaccacccctttagagagacagcaatcacatcctctgtgagcagtagagtttgattttcactaaatgtgattagcaaatggtttttaaagacaaaagaaccatagtttatttgctgtgttatattttgatttatagtccacattttttttcaaaggaatttaagatgtctcaacaaactggtatatggatgtgtgggaaatacttccgtaataatgaactgtgctgagttcgtggagcattaaaaagtgcttcggttcaagctattctattccaccttttcaaaaggtgggttcttccctgaaccattgcatagtgagaagtttagtatctacaaaaggtgtggtgtttcgtggttttgcatcttgtttgatcttcacactggacagtagcaactataaattttaaaaagttttctttctaaaattactctggaagcttacatgcagatgaccattgctctgctccaccacctttgctggccccctacagcctctgcaatgctctctccattcattagccattcattagctcctcccaccctgacttcacccatttaattgttcccctctctaaaggtccatttaaaatgtgatcttctctctcatactgcagaaatactactttttcccttataaatgcccatcgccttaatttctgcctccggtatggccgttgctactttttcattttatattttaggtggttgggtggatgacttacctcttctacaagacctttgaggttttcttttttttttttttttcatgaaagtttatgtctacaagacgctgttgagagcaacttgattcctcattcatttttgtttcccacaaagtttatgcctgaaatgtgtgtataaacaacatttgaaagaagaaatggaaatctcccatcactacatctcagtatgaagagatggagggaagttaagtcctaaatgaccagatttggatgttacatgacaggtggcttctgcacagtaaactgaggcagaactgtaagtgatgagtaggtattcaagaatgaaagagatcatgaccaaggacagccacatccgaccattcgttgtgttttgttgatatgccctgacaatagatgacataaccaaagaaagaaactgctgggggatacaggcctatacctctggatatatttttctattgtgattttagcttcagagcaacttccctctgacataacgaagactcttgagtattgaagatgaatatttattggggaaaaatgcaatgggaaataaagaaatcagaagattggagatgcttgacaaactactggaaattttattcccaagtaatttatttcttatttgtatcaatttgataaatattatgtaagttacgattatgttgaattgcaaataacaagagcaggtgtttatttttttttacataataacaagtccagaggtgtgtttagatgactgtgcaatggctaggccactggttctgatgttcttggcttcttccttatggtcacaagatggctgcttcagtaccagttcttatatctgcatttaagagattaaaaaagaaaaagaagaagaaaaagaaaaagaggcacaggtacttctgcaactgcatctgtcctcttttatcaggaaagcaaatgtgttcctaggaagccactggtggacttggtttgtttcatggctatgttgtctcgcatggctatgtatcgccaaaagggaacctttgaaaggaaatatttcattgaatgtttttatactctgaaaataaagtcatgtttattatatatgagataaaagagaatggttattaaacaggtaatagacagaattggtcactgccatttaattccaatgtcaggggtccctaaattcagcattctgggattaccttttcttttaaagctcaactgtaatagtattctctgggccctcattcaatctaagggttctttttctccctccatgttgagaatctgaaaacttccttcttttccttccttccttcctcatcttccttccttccttcctccctcccttccttccatctttctttcttccatctttccttcctctccttccttccttcttccttccacccttccttcctctccttccttccttcttccttccacccttccttcctctctttccttccttcctctccttccttccttgtcttccttccttccttccatctttcttccttccatccttccttcctctccttccttctttccttccttcctcccttccttccttcctcatcctcctccatccttccctccttccctccctcccttccttctttccttccttccatcttccttccttccttgccctccttctttccttccttcctcccttccttccttcctttccctccttctttccttccttcctcccttccttccttccttcctcgtcctccttctttcctttcctacctccctccttccttctttccttccttccttccttctttccttcttccctccctccctccctttattcctctatttctcttcccttctctctctttccttctttctctcttctttttctttccctcttacttttttctttgcttctcttctcttttctttcttttttgagacagtgtctcactctgtctcccaggctgcagtgcagtggtgggatcgctgctcattgcagcctcaacctcccaggctcaagggctccacctgactcagcttcctgggtagctgggactacaggtgcacaacactacacctggctaatttttctttttttttttgtagaggtgggggtccccctatgttgcccaggctgctcttgaattcctgggctcaagcagccctcctgtctcagcctcccaaaatgctgagattacagaaatgagccatggtgcccatctccttctttcttatacagacccattaaactatctttgcaacatcagtctctgaactcacctttgtcatccaaataagccatcaaggtttcctaagtaaagagctatccacatggatatggattaggcaactacccctagaatagaaaaatgactgcagtcagttgcttgaaatactctttttcctttctcctccccacaaatgaaaataaacacttattattttcaagttctgaaaaatagtgttttaggtctgaaatgttcagaaatctcaacatcagacactcggaagaaaatatggagtcagtgggacatgagtctgttctgtttaaatctacattcaagtatgttaaggtcagttttatcatgcaaccatcatttctgtagttttaacttactgtctctgaatatgttgtctttgtgatgcatgaaacagtgtcaaaatcaggaacgcgacttaatgtattattctcaacacttatgatgataaaatatcattggtctgttgtgagtaatgctcataaatgtcgtccgcttaaccatattcaaaccacatgcaaactttctaaccatatgcaaattcccatttgtgatggtcaccttcactcatagtttagaaaatgttgtggttgattatcccccagctctagtggtgggctgagattcggttaaaccaaccagcatatgtcattatccatggtagtaagcagctttggaaatagctcccatggggtccccacctcctggtattcatgctgttgtgtaatccctgctttttgagtgtggatggacttatcacttgctaattgatatggttttgctgtgtccccacccaattctcatcttgaattcccacatattgtgggagggacctggtgggaggtaattgaatcatggggcaagtctttcccatgttattctcatgatagtgaataagtctcatgagatctgatgatttttaaaagagaaattcccctgcccaagctctctctctttgcctgctgccatccatggaagacgtggattgctcttccttgccttctgccttgattttgaggcttccccagccacatggaactgtaagtccaattaaacctctttcttttgtaaattgcttggtctcaggtatgtctttatcagcagcatgaaaatggaataatacactaataatgactaaaatatggcagaaatgatgggatatcccttccaggattaggttattagagactgtgactttcatctctcttgtttgcttgctctcatgaagccagctgccttgttgtgaactgccctacagagaggccacatggcaaaaagctgagcatggtctctgccgaacagccattgaggacctgaggctctcagtccaacagcccacagtgaattgaatcctgccagtaaccactgagtgggtttgggagaggatcctggtgaaccttgaaatgactggagtcctggttgacaccacaattggagcttacaaaagactctgagctggaggacctagtgaagccatatttggatctctggcccatagaaactgtgaggtaataagtgcatgttattttaagctgctaagtttggcagaagaaggaggggagtgtaatttgttacatagcaatagataactgatacactcctagttacaaaagtttgtccaggtatgtgcatgtgagcaattgagccaatggtaagtaggctgatcctcgacttttcaactggtagaaggagaggggagggaaggaaaaaagaaagcaagagaggaggtggcgggcgtggagagagagagagagagagagactattttctgccatctatgaagcaaagaagttgttctatagctgttgtcatcttgcgactttgtggaggtaacctgtcttaaaagaaagctaacacaaatcagaaagcatagctgagagagagggagataccaggttctagggcatcatttaaataccttcatcacactgtgtctgaagccagtggatgtgaatcactggattccctttttttcttaagccagtttccatttttttttgtaacccagactttgacctgatacaaactgtaattagctgatgatcaaaacttcagctgtccaaagaaggacttgtcaccctaaaacagatgttccaaattttgtctcaactgacacaatttggagcatctgtttacagctttacaggaagggggagaaggtatttttaagtgtgtgagcacaagttaaaaaagtaattggaaactaagtaagtacaaaaacatcttcaatcaaagaaacattttgtaagctgaaatattgttcatttttatgatggtatgtgtatatcttcatatataaaacttcactgtcattagaaaatgtcacacaaaataacaaatacacctttttcaatctggttataaatatgcagaatggagtttatttaccaaagtgttacacatttccaactgataatatatcaataaaagctctcactccaagatgtcattaaagccacatttgttcatttctatttattatgagaaaaaaaaaacaaaatgaaaaaagtggatttgagtcatatttcctgtgagttcatcatttgctggcatataacacttgtgaattttattcaattcatttaaaatgatttcttacatgcagccagaaagttgagggtggcaaggaattcaaaatgatcagcaggcatccaagatttctcaggagacagatttagaatcacaactgaggtatgttttccttaaggaatgtatcgtagaaaaactagttctaatgaaccagaatttgttcctaataaattcggctcatttgtgttttgaaattagtagactcaaatgaccttcttaaaatgaggtttcttcctttcttcccttcccttcccttcccttccctcccctcccctcccctccccttccctcccctccccttccctcccctcccctcccctccccttctcttccctttccaatatagaccaagatctatggtacccatttcaaatgccctcagaactcattcttttttcgtgtttatttcataaaagtgggcattctatctataccaacctttgcacctaacatgtaacctgttttggccagtgggatgttagccagcatcacacaaggagaggtccttttgctcctctgtctctgtcaaaaaaacaaaacaaaacaaaaccaggctatcctgatggagaattacacatctggctcaggtgtagcagccaacagccagtgaggcatagagtgaacctagcatcacaagaagaactacctagcccagcccagcccaaatctctgacctgcagatctgtgatttaaatacatgctcgttgtttttagccactgtatgtgtgtgcgtggtgttcaggcaagtgtttttcaacattatcatggtaataggtaactggtacacacctaacacctgaataaccgattatatggttgaaatatctggaatgattctgatttcctatactgcgtcctgactgatacagaagtttatagacattttctcatttaattgtcacaactacctaacatggcaggtattgttgctgtcccattttacagatcaggatgctaactaaatcattcaagtccatacaactccgaaatggcagagtggaaagcaaaccaggatgctgaatttgaaagcccacattcttaaccatcagaccacactgactgactcagttttcacactgagagtgaaaaatattagcaagtttcctctggaaagatctagaagataggtttacaaggtctaaattgaatgggagctataaaggaagtacaggtttcatgcagagaatctgaagctctatgtccacttgcatattttagagctgaattcttggagggttgtgcagcctcttcatctaatacaattggatttggccctatcttcagatttagtcatttcttccatgacagcatattaaatgacaatctcaaataaagaccactcatctgaacaaagggaacacgccccactcaggcccttctttgatttataaccaattctcttttaacatgtggacccaacaaacgagagatagcttactagctcgaacaatgaacttgttagttaacagaattaacagtgtgttgtttcattgtgatgacagtaataaaacaggagacgtgaagcagatatagtcacaactaaatcgtaatggatgagatatttacagcaaagctgttaaaacattgaataaaatatgggaagagcaaaagcagatgtgtttttattcttctgagttgaagcttgcaaggtaaaaagatagtttgagtaataatcgcaggttctgattcacaatgaattaataaatattcatatggtaccagccgctgaaactttccagatacagaaataaagtgagaaagcctgttcttgccttacactttactaagtttagatttccagacacacatgtcaatatctccattaggttcctgtaaaagttctcttttattttccactgcgttccaagtcttgatggtgaaacattcatctttcctgttttgttccaaatgtcacagtatttcccccactcaaaccacaagaaagtagaaagaagtgatggtctattaataaagaagagacctataatttaagtagaagatagaggtggaaggaaatgagcatttctctttgaattaggcacaggcaaatgagctatatatcccattggatgtccacatccccaaatgaattagaacggtgggatgcctgattttgcaacagcaagcaaaacacatttatgcgtttttcttttgtgattatcattgtctttgttttaaaggagccgggagttttttgagagcacaagggaatgctaccacattactcagggttgaaacaacttgggaagcataatttggggggtgtgaaagcatcaggatgcttggtccaggtttgttttcctgcatttcagaaaaacagctgctggaaaaagaagggagaggcttggcgcagaactggtttggatttttttgggagggagaaaggaagaaagtgagacaagagtgtcttgcaggggctcagatctccctggctgggggccacagccctcccctcttgagtacctggtttgggtattggaggcttcctgatggatgtccatgagctctgcagtcggtagcacaacagggctccttgaggttgctatgacatcctttgttccccatttccctgcttttattggcatatgtaccttggcttgtatgtagaacccgagggctttgtgttgcattttcattttcccctctgttttattaatcactgcgtccttttctctccctgcacatccccaagtcttctccctagacttgcacaggaatctttcatttgggttccattctttgttttccctcagatgatctctgttggctgtaaatgagtttttgttgtttctcaccctctctcccctccttggccttcgtattattttttccttttaattaattccatccccacagacttacatttgcgttttttcattttcctattcttctctgtcttctttgaaaatctcagggtaatgttctgggcacttgtctgtggctcggagttctaggaagggagaggccggggaggggggcttccaagcaagtagggcacaagaccagcaggaagaagcagccccaagccaggactcaccaaggaagcctcttaccaagtgccttctggtcaaaagaaggttatttccagggccaggcgtgggggctcacgcctgtaatccccacactttggaaggccgaggcgggtggatcacgaggtcaggagattgagaccattgtggctaacacggtgaaaccccatctctactaaaaatacaaaaaaattagccgggtgtggtggcaggagcctgtagtcctagctacttgggaggctgaggcaggagaatggcgtgaacccaggaggcggagcttgcagtgagctgagatcacgccactgcactccagcctgggcgacagagtgagactccgtctcaagaaaaaaaaaaaaaagagggttatttccataagaaccttccttgcacagaaatctgagagcaagcaggcctctcaagggtcaagagtcttaccacttccattttgggggattcccgatgtgttagacaatgaagacggactaaaaaaaaagatttttaaaaattgtggtgtatttaacaaattaacactccttacacaaatctaaggctatttcattgtggcatgtgcaagcaaattagcagatttagaaacaacgcttaatctgaatgcactgctgatagtcttgcaaacaagtttcactaacaaagtccaaccacaccaggtattttagaaagcatgtgatgttcaaaagctagtattatttggtttatcggctcaaccacgaaggagttagtttcctattatgctctgattctcttgtcgccctgtgcacaattgaccaggcattttttttcctgagtggggggattgggggcggtctgagttttagatggttcacgttttttcctagtaactttagcagaggaattaattattactgtgcaatcgccttttttggaaggatatttggaatgtgcttcttgtctcttttcccttcagactttttttcttcttcttctttgaattggacagcctaaatgttagctttactggagctgaacatactgtaacacttaaccaaggtgaaaaatgactgcttgccaatgacttttacatctatattaagactatgctggttatatagcacagttagatataacatgttcaaatacagagagtgtgatagatccaggcatcgatgatatgctttctttaaaaacaaaaggattgcaagaagtgagccaggtatggctacttaggaatttgtgcaaataagaaaaacacagttattaacttttttaggcattggtctgtatctaactttactcttttttggatttatttattcattggctaataaagattttcagccatagatgggagtttgtttttttcctaggtaattggtaaatgaatagaaccagactttaatcagtaaacaaggtatctgataaattgattaaataaatgattcaatattgttggaagaatgagactacaactatcccagtttaaatcttcagtgctcttagaacctcattcttaagatgaggctctttctttatgaatggaattgatttacagaaaacgaagcatttggctgagtttgtgacttacttgagattgcacagcaagtctgaattaaatctgtgtaacaggttctaatcccatggtccagcaattagaccattctctctaagcttcttggaaaattaatttctcattacaaataaatatattctgcaccatggtctgaacataccaatgctaagcacattttctgacagacatttcaaagatatagatgagctcttgcatcttttcaaaagcaatgcaagggacattcacacagcaggtgctggaagggtccctctggcagacagaggagatgcagaagttctgctcaatcaggttttcctgaccaagcctgtctgtgtagctgcggtaaacatgcacaggtctagcgttcaaaaatgggcccctggctctcacaatgaacctgacaacctgaccaatcaaattcaagtctaccacgttgccagggtaactaatacacagtcacaaaaacagaacgatcacagtgagggaaaaatacaaaatgcagcattttcatgcttagagaaagaaagagaaaacacaggctgaccgtacatagcaggaactgatacttgcttcttccttaactatgagccattcatttacagccatgtgcaaatgcctatgtgcagatgtatgcacctatcctctttcacagaaaatatgtgcctcacttctggaacattattagtgaatttagaatgggagaaagatggcagattatggtttgaggtggaaagatctggaggcacacacacaaaaaatgagcatccacccttcttccttgagcaactcccgggttgaaaggtgcttccagactcaactcagtcaatggtcctttcttccagtatttaaaggatgctactgccagggtaataaaagccaccccatgcccttagcaatgactatctccaggctaaactgtccctctgttttgctatgtgcccccatagtataggtgccgaagtgattctgaaaaacgtagatcatgtcctgcccccgctgacagctcctcccctgacttcccttgcaggctgagcagcaggtggtgtttacaccatggcccaccaggtcctgctgagtctgcctcttcctaactctctgcccttatttcttgactctctcccccacagtccactgtcaacaatcttcctttctgtcccttgaacatgccaagcttatttccacttgcattagtttcctggagttgccataacaaagacccacaaaccaggtggtgaaaaacaacagaaatgtattctctcatagttctggaggcttggagtctgaagtcaaggtgtctgcatggccgtatcccctctgaaggctctaggggagtctattccatttccttctctgagttcctgacgttggcaattcctggcattccttggcttgtgggtgctttgtccccatctctgcctccctgtgtgtttctacatcccttctcctcttcttatgaagacatcagtcactggattagggcccacctaaattgagtagaactcgactatatttgccaaggctctatttccaaatagggccatatttgcaggtactagcagttatcacttcaacatatcttttcggggacacaattcaatccataatgccacctcaggacttccaccttgaattctcttctactagcccttttcatggctggctccttttatcttttgggagtgagctcaaaagccatcttgtccggaagcttcccagatcacacatttttgacttcccacccctcaacttcttgtcatcaatgccctttgtttctttcttagaccttatcccactggatatacaactcccctccctctctcaaggagaatatgaactcccaggagtaacttctttgcatgtcttattcacagctccgttcccagagtgtagatgagtgcctgcaacaaaataggttcttgataactatgcattgaatataaaatctgaatcagaaaatttgggaagtaggagaagttgtagaagagaaggctgagttgaggtggtactgaatttatgacaagcattcagcattttctgtgacaaatatctgttggacatcaattatgtgccagacactgttctaagttacagctcagctaagacagacacaaagccttgagctgcatctgagtgagagcccgagcacctgccatatgttgagtgcttgctatctgccggcacagtgcagaacacctgtgatgttaatcctacagaaaattgtagaaggcaggtgctatcattaactttacttcttcccaggtgaggaaacaatttcagagcaagttcacctcactggtaagcaggagagcaaactcctcctaaacatggggttccgttccccaccctcttagctgctcccctatgcaactcttgaagaaaacactaatgctggccagaagtccatgtagttggcaatcagctgcattttcctgatgagaaaatgaaacgcaggaaagttaaatcacttccacacatcacaagctaaggggtggcaggtaggataggagggagacggccctggtttgttgtcagagcccatgttcataagccctacctttatgtcctcaagtctataggtttgtgggcaggtatagcaggggtatccttttttttgtttgtttgtttgttttaacagagctcagaacccaagcttctcaaactctaaagagtgtaggattcatcaggggattccaaacctagactttgaatcagcaggccagctgttcccattaccctcgtgtgaccttctggggctccctgatttctcactcatagccatactcaccacatggcaggctttgtgctacagaagggtccctgggagtctgcaggacaccatggcccaaaccacttcttcttgttattccctgaaacagacatatgtttctttgcttaccccaagtccagaccttctgatagtaacatctcgaatttccttttgaggaaccatgcctccctcatcccagtccaaagagtttgaatagatttgactcttcctccttggttccagatgtgacaatgtacttcaatggactttatggggaacaagaagacatcttctcactagggctacaaagtgcatagaatgcatgttggatgctctgttactgtgaagggagagtcacccagataataaagccagcattgaggtaagcagagatgaaaattagagaaagaattctgatgaaatcttgaaatggctggatctggtcctgggaggtaggcttattgcaaacaattccatgataagtaagacaataaagtccctttttttgctaaaatcagattaaattagatgttgacatctgctgccaaaagaatcccaaataaaacatttcctttaggataaattcccctgtactccagaacaatctccctcagaaactggagtggctcatgatggtatttcaaactaaagtgccaatgactaggaatgcttgctgactcaaccactggaatgttctggagatgaaattgatatttgaaagcaactggagggtgactgacagttggtaggtacttaaaaaatatcctgagtctatctaaatggtgtattttctttttttatgtgctagaatatatgtacttggcaaatctcaaatatgtttgtaatttggggaatataataggagatattttatgtgagaaaagttctcatcattgctttttgcctgtttggtttattttacatgactgtgaaatgcaaaattccaagattttgactttttgaatgattttcctctctctcccatctccttttctcccacacttacaccatccatccccagtggtcaaaggtacgaggatccaccatttggaacttcatcttttaaagaccagaaactcctcttcaggagaaggaagggtgtgatttattgtggctttatctaagataacacagtgaaagttcaagttctctagtttctttattaaaaaaaaatatatataaataccagtgatttatagcaagggtagcaatttagtgcataagaaattttttttgctctattcctctccatcttcacctttcttaaagtaactaattttaacagcttagtgcatatccttctagtcatttttctatggtgttataaccagacacaaatgcatgcatgtatatgcatgtatatatgtatgcctatatacataaacacacatacacacatcatttttttttaacatattcttgtacactattgcttttgtatatatttccaaaggtaggattgctgggtcaaagggtatgtatacttctatttaaatgaacacagatgattactttccagaaagtttacagaacttcatattctcaccaatgtatttctccaaatcactgctatcccagaatttttttgcacttggtactgtggtagtttcatgatttttattcttttttctctttataagagttagcatcttccccattcgagtccttaggaccatcacatctgttctatggccccattgtgcatgcctttcctgtctttcatgtgttctttcggaggttgcccctcgtaataatgaggatgaagatgcagctgatgtttattgagtgttgactacctgtgctgagtctgctacgcacttacagtgctgaataggtttttttactgaaagtttttcctttgatattcacgataaccctacgagctatctagttttataagtcggcttttacagattaggaaactgaggctcagaaaaaagttagaggataggtgtggtggctcacacctctaatcccagcactttggggggctgaggtgggaagatcacttaagcccaggaattcggggccaccctgggaaacctagtgagacccctgtctctaataataataataataataataataataataataacaacaataagataaaataaattagctgagtgcaatggcgcacacctgtagtctcagctacttgtgaggctgaggtgggagaatcactggagcttgggaagttgagcctgcaatgagctgtgatcacaccactgtactccatcttgtctcaagaaaaagggtggaggggaaggttagagtaatttgcctaaatgtgcagagggagtgagaagcagaacagggatgaatccgagaggtctgtcaactgcagcatagacggcacacaagcactgtgcacattgcctgctggatacccaagatgggattcattaaagtgaggccaggtctctatgacaaaagtccaagaacctcctgaaatgttgtgcaggatgctgggagaggtttgatttattttcttcatttactaagctagcaatttaatcttacatttcagtttgaaatattttaaacatgcgttcccaatatttgtttacttatttataaattatatacttgcactgaagtattgatatcttatgtccactagaaagcatacataagcagttataattttaaatggtgactcagtttgagccattgtaacaaaaataccatagactggatggtttaaacgacaaacatttatttttcatggttctggaggctggcagtcggaaatcagggtgccagcattgttaggttctgatgagggtccttttccaggctgcaggttactgactttctattgtatcctgacatgacaaaaggggcctttagtgggtaattgggtcatgagagtggaatcctcatgaataggatctgtccatcaaagcagttacaagcctgccttgccctaagggctggggaattagactaaacttttttttttttgagacagaattttgctcttgttgcccaggctggagtgcagtggcatgatctcggctcactgcaacctccgcctcccaggttcaagtgtttctcctacctcagcctcccaaatagctgggattacagatgcctgccactacgcctggctactttttgtatttttagtagagacagagtttcatcatgttggtcaggctggtcttgaattcctgacctcaggtgatctgcccacctcagcctcccaaagtgctgggattgcaggcgtgagccaccatgcctggccagactacaattcttgatgagggaataggattcatgaggattccactctcatgacccaattacccactaaaggccccacctcctaatattagtttggtgcaaaagtaattgtggttttgccattaaaacgaattggctgtagctgaggctgcagtcatctgaaggatgtcctagttgtgccattggcattaccattaaaagtaatggcaaaagccgcaattacttttgcaccaacctattattactttgcagattagaatttcaatatgtggattttgggtggacacaaacattaggtctattacaaattgataagataaaactgaaattacttgtaatctaattattctatttgtgaatagtaccaaaatatcattgctctcactaaataaaattactattagaaatgaacctcatgcttattagttttacatgtttcatgacttgcaatggcttcatagtattattaaaaaatatcttaagccatggctgggcgctgtggctcacacctgtaatcccagcactttgggaggctgaggcaggcggatcacctgaggtcgggagtttgagaacagcctggtcaacatggtgaaaccctgtctctactgaaaatacaaaaaattagccagggttggtagtggctgcctgtaatcccagctgcttggaagctgaggcatgagaattgcttgaacctgggaggaggaggttgcagtgagccaagatcgagccattgcactccagcctgggagacagagcaaaactccatctcaaaaaaataaaaagtaggccaggcgtgatggctcacacctgtaatcccagcactttgggaggctgaggtgggtggatcacgaggtcaagagatcaagaccatcctagcaacgtggtgaaaccccgtctgtactaaaaatacaaaaattatctgggcatggtggcatgcgcctgtaatcccagctactcggatgctgaggcaggagaatcacttgaacctgggaggtggaggttacagtgacctgagatcgcgccactgcactccagcctgacaacagagtgagactctgtctcaaaataataataataataaaataaaataaataaaaaataaaaaatattgagccataacatgtatttgggaggaggtttattgtttaattatctagtaacatgtaacaaatgatccccaaatttagtgatttaaactcacaagtttgttttgctcatgatttctgggtcaggaattaggaaagggctcagctgactggttctcacctggaggtcctcgtgtagtacagtctgatattgggtgaagctgaggctgtagtcatttgaaggatgtccaagttgtgccattgccatggctggcagctttgggaccttaactggggctgttggtcagagcattcatgtgaccctttcaccacgatggtctcagtgtagctggacttcttgaatagcagctcttgctccctccagaataagcatctcaggagaaaccagagagggaagctgtatggcttttcctgacagccttggaagtcacgtagcattccctctgtcataatgtatccatcaaagctgtcataagcctgccttggctcaagggctgggaattagactatacttttttttttttttttttttaagacggagtctcactctgtcgccaggctggagtgcagtggtgcgatctcggctcactgcaacctctgactcccaggttcaagaaattctcctgcctcagcctctcaagtacctgggactacaggcacctgccaccacgcccagctaatttttgtatttttaatacagacggagtttcaccatgttggccaggatggtctcgatctccggacctcatgatctgcccacctcagcctcccaaagtgctgggattacaggcatgagccaccgcaccaggcctagactatacttcttgatgagggaatagcaagatcacattgtaagccagcctatggaatgggagagatgactgaggctatctctgaaaaatgtaaacctcatcattaccgattaagttatttattaatagatatttatggaatgcctgctatgtgccaagctaagaatatgagtaaaaagcatgaaaaaacacaagatccctgctgttctggagcctatattctagtacagaaaatatcagatcatggttttaaatgtaaatctatatgttacataatctgctggataacttccttttttgtttgtttgttttgacaactccgagttgctcatcatcattttttttttacatcacaatataactgataaaaagctcctgttaatggtggaagaagttagagccattttctccttgcatgcagatgcttgcattgttaaaatttccttcaattcacattactttgtaggaatctttaagccactagtcctttttgtgagggctgctatagttaagaggtgataatgctgtctatgaatccacattactaggcatgtgtaaattgcaagaaacctcaataggctgtaggctagaggcagtaagaacaccattgtcatctgcagagacaatttgacttcctctcttcgtatttgaataccctttatttctttctcttgcctgattgctctggccagaacttccaatactatgttgaattggagtggtgagagagggcatccttgtcttgtactggttttcacagggaatgcttccagcttttgcccattcagtatgatattggctatgggtttgtcataaataactctcattattttgagatatgttctatcaatacctagtttattgagcatttttagcatgaaggggtgttgaattttattgaaggccttttctgcatctattgagatgatcatgtggtttctgtcattggttctgtttggattacatttattgatttgcattctactataaagacacatgcatatatatgtttattgcagcactattcacaacagcaaagacttggaaccaaaccaaatgtccatcaatgatagactggataaagaaaatgtggcacatatacaccatggaatactatgcagccataaaaaaggatgagttcatgtcctttgcaaggacatggatgaagccagaaaccatcattctcagcaaactaacacatgaacagaaaaccaaacactgcacattctcactcataagtgggagctgaacaatgagaacacatggacacaggaggggaacatcacacaccagggcctgttgcgggggcggtggggggcttggggagtatagcattaggagaaatacgtaatgtagatgatgagttgatgggtgcagcaaaccaccatggcacatgtatacctatgtaacaacctgcgtgttctgcacatgtatcccagaacttaaagtataatttaaaaaaaaaagaatgccattgcctcccccatccccaattcctctgagttgtagaattcccaccttctctcagaatttctgcaataccatatgtaaccgacgcagagggagtgaggcaagtgtcaagctgcttattaaaatataacacagtttaatttctttcttatttttagtttgaagtaagtataaatagaaggtctaatatcttttttagcttattttccactttggaggacactgctctagaaaaaaatcagaaaacactcctcaccagttaaagaggatgatgcttctggaaaggacacagtccccaataatgaaacaacccccacaagttgtctccgtgagtgccttctcttgagtgatgatgcaaaaggagctgaaatgagttgcaacttgcaggaagtagcctgacatacaacattgtttaaattaaagtgaatgcaaaagagaagcttgttacagcttaaatagatagagaaggagaactttttctgtttccagttgcttgtctgctttggttggagaccatatgctttgaagaatcttacaaatattcctgtccatatacgtattagagtatctcaggcttttctctctggaagcctttgtgccattgtctgaaggatctataaaagcaataagccatcttgtaaatggagctggaatatgggatgctcttgttcctttcttgccagcggccactggcatttattccggagttgatgcatcagtgaccagggttattgctcccagaatccatgttaaaccacacaagcaatggaaattttctcagctgtgctgtgaactcagtctaggcttatttcactcaagtatgaatagcaataaagatattaacagcaatgctaatattaattctaatagctaagagtacccagcgcctacttgccaggtgctgtgctaggaagccacgtggatttaattgttactcctcacagcaaccttatgagaaatatactgtcacttattggacatcagagcaggaagcttctccaaggtttggaggaattaaacaatttgaacaatagagtctgagcccaaggaggattcccatagtctgactccaggtttgcaaggttaattaatgactttctgtctctctaatatatatctctatatgttatatagatatatataatagatatttacattatatataatatatataaaacttatatataagttatgacaaataaattttaaccactatggaaaacttgcaactcaagtttctatacatatgatatggtttggctgtgtccccacccaaatctcatcttgaattgtagctcccataatccccgtgtgtagtgggagggacccagtggggagtaattgaatcatgggggtgggtttttcccatgctgttctagtgatattgaataagcctcatgagatctcatggttttataaagggcagttcctctgcacaggctgtcttgcctgccaccatgtaagatgtgactttgtgcctccttcgccttttgccatgattgcgaggcctccccaaccacgtgagacggagtccattaaacctctttttctttataaattacccagtcttgggtatgtccttatagcagcatgggaatggactaatacaatatataagtatatattatatataatatatacatataaaatataaatttttatatattatataaactatatgaatattatttatatactgtaatataaatgtcatattatatgtaatatgtaattataattacatatcactataatatgttatatatataatttattagaaggtcattttggccagctccacactgctttttgaccatcttacatcaatgcctcatgtcaccattgccaggtgttggtgacagaattctaagatgactttcactgaccctcacccttgtgtaatccccttcccttaagtgtgggaggaacctgtgactatgacaagataccatgcccatggaaaaagggattttatcatcgtaatcatgatgcataattagttgacattaggataaggggtttattctgggtgggcctgacctaatcaggtgagtccttgcaggagctcacgctcttcctgtagagagagtcaaagaatgagtggggtttggcatgagggagattctccaatgctggctgtgaagatggagggggtcacatggcaaggagtgtgggtggcctctatgagttgtgagccagcaagaaaatggggacttcagtcctacaactgtaaggaactgaattctgttgataacttgtatgagcttggaaatggatccttccccagaccctccagatatgaatgctgcttaaccaacaccttgatttcagtcttgttagatcctgagaagagaatccagtcatgccacgcttgggcttctgatcaactgaactgagagctcatgaatgggaagagctcattatgttaagctgctgaattggtggtaatttgttacatgacaatagaaaaataatataccattttcttattattaatatactttttctgcactatagactcattgaggtgccatgggtgtctttctttctttctttcttcctttctttcttccttccttccttccttccttccttccttccttccttccttcctttctttctttctttctttctttctttctttctttctttctttctttctttctttctttccttctctctctctctttctttttttctcatctcctttgcattgtgcttacacctagcaggtgctgtaaatgtgagctagagaggctgtgtgtctagttaggaggacagactctggagccagactgcctgggtttaaacctggcgctgtgtcttaccagctgtgggaccctgggcaacttacttaactgccatgtgtaaaataggaatgaaataatcatgcttgctcataaggctggggtgaggatgagatgacctttgtgtgtaaagtgcctagtacatagtaagagctcaacaacatgttagtaattattactgtgtgtttcataaattagcaaataaatcttaactactatgggacaaaagccctataaaaaattcgtaaatgtctctacctgcttaagataagtttatggatttttaaaagcttttctggactacttgctattaaattactaaggtatcagtactacagggatgtcctctggcaccatggagaattggggcccagtcctaaatggtcccattctgtatgatttctatttgaattcatttggggagagaatctgtagctttgaatgaaattttcaaaaattcctgttcacatattagaatatcagtatctgcaggaaaaattgatttcttctttgtcgttgttagatgttcccttctgggcatgaccatgtactgcatttagcaccagttgcttctagtttccccacatgtactgtgggctgaaaaacccacagtgatcaactaagcgtatacgtcatgctctatttgccctggcagggccatttgccaccctgtcgtaccctgctctctggctgcaaagctgaactttaggggcttcatcaactggctccctaactcactgcctttcagctaggcaagctggcaagaaataagagggaagagaggaggctgggatatttgtttcctagactcactttttctggggttgccttggctggtcgtttcctctgtggtcatcattcctcttcaggtagccttttttcacagagctcttcctcgttcctgattctgggaacaatgccctcctcttttccttcagaccccaggatggtaacagcttcttcaaatttccgacaccaaaccctttgtaaatagtgcctttactgaactgcccttgaattatcccagtctaaatgagccatctgatttctgataggcccttcactgttacaccgagatcgttagatttttaagaagagtttggagtccataggttctgactgtagctctctaattagcaaagtgcttgagtttgactacatctatatgggctgttcaaaggaccatttctcttgcttttcactgggttttcagttatattctagatgatggaagttggtagagaagtgacctgtgtgtaaatgagatatttcaggaagttttgccatcaggacatcccactccactgcatcttattttgaagcaagctcagatctgaatccattgaaacaggagctgacaaactgaaggagcgaatcttcagacaagacaatttttaaaggttgtttgtacatgtctttagataaaccgaattgtcccttgaattccatttcctgcagattatttcgggaaattctcgaaatggatcgtgcattcagttctcatatggaacacttctattttgcatattgacatgcattttaacaagaaaaaggtcagtgatgggaacagcactgcttgttggtgtgacagtcaacatttacctgagcctttgtgatacactgcagttcaagataatttagtaaaataattgtcatgattgatttttattttctttctgaacccacagttcactgtgttgctcttgggctaggtaactttcagaagcttaaacttccttttggtggaaattcatttattcagttctggatggatgacaaactttgattaaaatcatgaactcttttatgatccgttggcgatagctggtgaacccaattgctgttgacttattctttgaccaacatctgttcactgggtgacatgagaatggcagaaaatgaatggttgggatttttctgtgcataatattctttcttataaatcacacatctgaggactttggtgggaacctggggagaaaggtggcattcaaacacattgtcatcacaatcataacagtcatgtagctttacatagtaagtctttgtccaccaatggtaagattatacttttgtgagagaagaataaaagacaagttatgtttagaatagtttacaactttcacttatgagaaaagagggatgcacttgaggagaaatgcatgacacttagatcaaaagaaaggaagagatgcccagagagggccagaaagacaccagataaaagaaaatctcagttcaatttgagaaacatttattgaccgattactatgtgccaaatactctgtctggtggtgtttctcacagaatcagtcgagatggatgtcacttttgacattagcttgcttggcatctcctgggaaaaaaggggacaaaaaactatctgtgctaagtatttgctgattttccagccatatatccactcctctttctgattttccttggtatcattcttccttgttcttgggctttgagttgtagaaagggctgaccctatatctactcccaaccccaggtgtggacatgggaccaggctgagccagttagcacagcaataggttcagctagctacctgaccccaagtattgctgtaatattcaattatatatttggcaaaaaccagaagaaaagttcttatctgctgtagttgcacttgatagggattctaagtgtaagagtaatgtaaacccacaatttctgggagttaccacatagagaaatcttgctgaacatgaagctgagcacagtgcaaagtggaatttagagactgacagatatcaagccctttgattggtatttgagctcctggatcccactatgcctgaagctacatttacctccttggcatgtccaaaacattctcctctttaacttaaacctacttggttgaatttttctcatattcttttcaaagaccaatacatttatttatcattatactagttgttacgggttgaattttgtccctcaaaaagatgtgttgaagtcctaacacccaataacttagaatgtaaatttatttggaagtaggattgttgtagatataattagtgaagatgaggtaactaattaaggtaggcccttaatgccacatgactggtgtccttataagaagagagacccagggataagatgaccatgtgaagtagaggcagagactggagttatgttgccacaagccaaggaacccctggagctactagaatgggtaaggaaggatcctcccctagagccttcggaggaggcattacctgcatgacaactcgatttggggcttttagcctctagagctgtgaggcaatgtttcctgtggttttttcttttttgagacagagtttcactcttgttgcccaggctggagtacaatggcattatctcggctcactgcaacctctgcctcctgggttcaagtgattctcctgcctcagcctcccgagtagctgggattacaggcgcccgctaccacacctggctaatttttgtatttttagtagagatggggtttcactatgttggccaggctggtctcaaactcccaacctcaggtgatgcacccgccttggtctcccaaagtgctgggattacaggcgtgagctaccatgccccaccgtttttgtggttttaagccacccagtctgtggtactttgccatagtagccctgggaaattaacacatcaataagaagtgatctgccatgatgaaggtattatgggagtttgggcaagaagatgactcaccctgatgggaagatgaaaaagacttcagaaaaagttttccaaaggaaaatggctcttgcactagtacttggacgatatacaaaaattaaacaggtgaaaaaggagaaaggagtgtcttgagcgaaggtgcttgtggatatggaaacgtgtttggtgacctgcagggagggggctgtttctccagcaagaatggctgtggaggttccccaaggcatgacacaggatgggcaagtgtaggtggagtcataaggcactttacccttcacccatggaatttacattttaacaggagggcaatggggctctgtcatgagggcaatggggctatttccacccggagtcctagcaggcagttcatggtgggcattttaaaacaaatttagaattttggggtctaagaattttgacaccctatcatagagccgagtttctcagtcttggcagtattgacatttgaggctaggtaatcatctgttgttgagggcagttctgggcattatggggtgtttagcagcaccactggcttctacccactagatgccagtcaccctctcatctcagtgtgacaaccaaaaatgtctccacacattggcaaatgtcccctgggagtcacaattacctccagttgagaacctgtatactagacatgaaagagattagactcattccacaatcaacagctactgcaagcccgttgggcaccaggcactgttttaggcactgagaataataagtgagcatgaaagacaaggccctgccctcaaaggactcagattttccagcaggaatggcttcatgtcacatttccacagtctatggctggaccagctgggtcccagatggctgtccaagctctgtgagagagaacagccagaagagagagaaggtttctgcaatcatgacagctatattgctgttggagattgtagtattgactgctaggggcttccatatatttatttccacctcttccttagtagcgagccttcattttgagctgggcacataaccccttggcatgaaagtctgcatttccttgcttctcttgcatttctttggaacatatgcattatgactaaatctagctaaagagacataagagacagtgctatgaggacttcagagaaggctccttaaagcaggtggagatagtgacactttccactcctttctctttctgctgcctggaatgtgtatttgatgcctggagctctagctgccaccctggagaattcggtgcatggtgacagaataatggccccccaaagatatgcatgtcctgattctcaaaacctgtgagtaccttactttagatggcaaaaggaacattacagatgtgattaagttaaggatcttgcgaggggtgattatccaggtgggcccactgtcatcagaaaggttcttagatgaaggaagcaagtgggtcaaagactttggaagcagaggttggagtgatgtgctttgaagatggagggacaggccatgagtcaaggaatgtgggcagcccataggagctggaaaaggcgaggaactgattttctcctagagccctgagaaggaccacagtcctcctagacatctttttcttagcactgtaagactcattttggattgtgaccttcagaatggtacaatactaaatgtatgtcgctttaagccaccaaattagtgatcatttgttacaacagcaatgggaaatgagcacaaagtgatcttgagaagggactcttgtgctgggttggggaagtggaaagacaaggacatatgttccctgatgacaccattgggcgaccatgttggccttagatttgttacttttggacttcttttatgcatgaaagaaataaacttctatcttatttaaaacagtcttatatttggtttagtgttgtgtgccaccggtctgtgtttccatagcttctgaatttgtctatttgacatccattaattacaaggccaaactaatgaccaaagttgtttccatttattctgtgatccatatttcatactctgagccctctcctgtagcttactctcacacaccagcccaatatgtcccctaccctaaatcaacctggggccaggtaccagacaactaggaacagctttaagtcccagagcccactagaattatttaaactagacagctctaagctgttcacctgtcctgcctctgctttcctgcagaaaacctgatgaaggctgtgccgggtgccttcctcagataaaattgtggtcagggatctttttgtgtgggtgacctttaagctgaaacctcagtgatggagagaagccattaggaataagaatggggccagttcaagtctttttaggcaggaggaatagctgggcaaaggtgttgaggtgggtgggaactttgtaaattagaaggccaggtggttggaacatcaggagagatggagaaagatgaggtcatatggtgccataccaagttaaggaatttggcctttcttccaggtgctgtgggaagccactggagggttttaagcggaagacattggctccaatgtgcattttaaagagatcactctaatgttgctatcttgagcatgggaaaagctgacccaccatatggcatggtccaattctgtcatgccaactttcattagtccctcctggggccttaaaaattatattagagctgactcctaatgttcatgtgaattatgatccaggacaccagagcgaggctgcttttctttgtgcatgtggtttctacatcagatacggtctttctatgaggcagataaatataagtacttgaaagtattttatggatcaatgaaatattaatggacctggaggtgctttaagtttatttataaagctgggtcatctataggtcaaataccattatagcaaatgcaattgtaatgaatatctttgataaatttggtttttaaggctcaacccatgtcctgcttatttcaaaattatgagctgtaggcttgtaatttcttacatgcaattctgaaatccaaaaaaaaaaaccacctgaagaccaaagttggctattttaaatttgttttatgattcacttgatggccaaaattgaactaagggatatccccacacagcaagatgaataaggactatatatatgtatgtgtgtgtgtgtgtgtgtgtgtgtgtgtatagtgacatttgaggctaggttgcactgcagaaatattgggcttgattacggggatcagcctcagtttcctttgagattatgatttaatatatctgaacctattaacctaaaatctaagtaaaacttgaattttgaaatatatttggcctgaaaattccagatgggggattatagacctccacaactgtatgtgatcatttcttcagaatgtgcaaaacaggcatttgaatcataattgatcatattagaaggtaggtggagccatttaaaagactaaataaattacagaaattctaataagtgtacatttgtctgtcccattaattttacaaaacattttgtttgtgggtggggatggggaatcctgtaaactctttgaggtcaggggcgaggacgattttatcaccatatccctaatacgtaacagagcctgaagcactagctactcaataaatatgtgcagaatgtaattattaactcggttgaggaacctggggatcagatgatgcgtgacccatccaagtgctggggttggtggactggaactcaggtcttctgacaccttttatttttccttatactgtcactgctgtgctaaaatggaaaaaaaaaaattgaaggcctgtctgaggtaatcaaaaacattggaacataaaggaggaagaggaaggcaagtggccttcgtttccattggacaaagctaatcagtctgtatgaatagccaagggtcttgtttctagataaaagaaaactctccaatcagttctaatccaagagcatcgctggcagtgagagattgtaaaagcgaaatattcactttgaaaaatgaaacctattaaattcagggcattgtaatttcccattgtgagactgttgtaccagcgattaaattctattgtgtgtctacagtccttgttaccaacgatgtttagtattattaactgagattctaagaatatcagctctccatagctggagagctgttctgttcctcatgtgaaacaatttgcatatatcttggattcgcccttgatatgcctctttccctccttattccctgtatgccatttagaagccagtcctgtagactccatctccaaatatattctgtgtgtgttcatttctctgcccacatggttcacatctgggcaactctggcagcttctattttttaaaaaaatataacctttaacttttattttagattcatttgcaggggtacatgtgcaggtttgttgcatgggtttattacatggttgtggatatacacatcagctttaccagatagtgctaagctgacctccaaagtagttctaccaatttatactcctgccagcagtatatcagaattttcctgtgttacataagaattttcctctgttacatccttgcctactgatagtatttagacttttaaaaattactgctcggccaggcgcggtggctcacgcctgtaatcccagcactttgggaggctgaggtgggtggatcacgaggtcaggagattgagaccatcctggctaacacagtgaaaccctgtctctactaaaaacacaaaaaattagccgggtgtggtggcatgtgcccgtagtcccagctactcgggaggctgaggcaggaaaaaggatagtaacacaggctggcctgggcagcatcacaggactgcacataccccaacatggtgggaaacaagcagccatttgtattcatggggatatggaaatgttgtgtgaactctttgcctggaagaagactgggttcaggtagaggaagtttaggggactgggacttcatgcccggaagcaatggtgagatccagggtcattaacactagaggccaacacagagcccaaaggactggtgggtctcaactgcatcttggtggacaccagcctggaatgcccattgagcagggaggccaccctctgcaacagtaattgcagtaagtgtgaagggcaatgccggaagaccatgaacagaaggagccgtcatgaaaggggagctcacaggccagaaatgccttcctggcaccatgaggaactgacctttccctgatgcccaggtgcattatgggaaggggacaagaaccctgaaattagggagaaactctgaaaggttgaaaaattactccaaagaaaatttagcaagatgagtactaatgcccttaatggataaatgaatagagtttggttgtctgtgtgaatcaagcttgagaacaaaggggtatatgttagagaatatgattcagctctccccctcctttttcttttatacattggagtcagttataaatattaacctttttttttaaatgaagtattgatatgtgttataacgtgggtgatacctgaaaacattgtgctaagtgaaaaaagttagtcacaaaagaccccatattttatgattctatttatttgttattaatttttttatttccataggttattggggaacaggtggtgtttggttatatgaataagtcctttagtggtgatttgtgagattttggtgcgcccatctcctgagcagtgtatgctgcacccaatttgtggtcttttatccctcacctccttcccaccctttccccctgagttccaaagtccattgtctttgcctttgcatccttatagcttagctcccacttatgagtgagaacatatgatgtttggttttccattcctgagttacttcacttagattaacagtctccaatctcatccaggtctccgtgaatgccattaattaattcctttttatggctgagtagtattccatcatatatatatataccacagtttctttatccactcattgattgatgggcatttgagttggttccacgtttttgcaattgtgaattgtgctgctataaacatgcatgtgcaagtatctttttcgtgtaatgacttcttttcccctgggtagatacccactagtgggattgctggatcaaatggtagttctacaatgagaacacatggacacaggaagggtaacatcacacaccggggcctgttgtggggtggcggaaggggggagggatagcattaggagatatacctaatgttaaatgatgagttaatgggtgcagcacaccaacatggcacatgtatacatatgtaactaacctgcacgttgtgcacatgtaccctaaaacttaaactataatttaaaaaaatggtagttctacttttagttctttaaggaatctcatattaattagaaatgatgaagatgataaaagtaactaagaagtatgagagtgaggttaagggcaccctttgatgacatgacagtaactaagaggtatgagggtgaggttaagggcaccctttgatgacatgtcagaggttcttccaggagaactgagacctacccaaagagaagaaaccagtgatgaataaggttgggagaaaaatgtgccaggaagaagaaacagcccaggcaaaggccttgaaatattattgagtttcgcatgttctgagccatgaaagaacagtggggctggagctcaggaagttaggaatggagtgaccaaggatgaggaaggagaggtggacgaggaccaggttatatagggcctggtaggtaatgatatggaggtctgggttttatactacgggcaatggcaccatgaaagagttttaaggacttgatttgtgtttgtaagtgatcgttatgccctattcaatataaaataggaagaagaagaccaggaaagaggctactgcagtgcataaccagagacggagttcagtaaatggattcagaatataatttggagttaaaattgccacagcttgctaatggattggctatgagaaagagggaaagagagaaatgataattcctaaggttttggtttgaataaatcagtggttggagttgggggtgatagagcctttgactaaaatgggaagactagggcagaaaagtcttgggtggggttggggttgctaactccattgctaatgcatggctactgtctgatttctcagtactaaagaacctggatctgccaaactgtaaactctccttcaaacatcaagggtgatgacaatgcttgcaatatagttgatataaaactatgttcaagtccgtgtgtttccattatttggtttttacttagttgatcatttattaatgacactgtttacatttgcatttggatgccttgctataattaaaataactcttgaatttatcaactgagccctaaattaaagacccatgaaaggctccacatgatggaataaattttcatattcagttgtcttagatatggacaaccatatacgtttttctgacacacgtaatgtttgacatcagtcaaaaagagtacaacagaaatattctgtgtttaaagcagagctgggggaaaagaaggctaaaacattccatattgcataaaagaaagagttagattgtcaccaaagttaaaggaaatcaatgggacgactttggagacccatttcaatctgttgttgacattgttttctggtagtaattttctcaaaatgttaacagtattgagtttgcctattgattctattatttttgaccttgcattagtgtgggctaatcttacatgccataaaatttttttttcacagctgaaattattgtatgactctggaggaaacctccaatcaggtcagatgccctgctcaggatttcgatgagtgtataagcaacaataatgagctatgttgacttccaatacactttcatgttgtttacattttattaaatggtttaagcagggtcatcatataaatgatcaacatattgactaaaacactcaagccttgaagaattgaaggccacagacagccaaccagattggtcaccttgaatttgagtcaatagcataaatatatatttggctacagagtcaaagcccactttatattcattattctgaaaaccctgctaaataaacagctccaaagtgtcccactggaagatgcccattctactgactcagtaaccctgcctagctatgtcctctccagaaccaaataatccaagctgagtgaattcagcaaaactgggggcagttgatgaagactaagtgaatgggaaaccaaaaactcttgaatggttttcctgggaaacaaatagatttattgttggctctatgtagaagaaatctggcagctatattttcaagggtttatgaaatatagtcacaacacatcattagcatcctgtctattccccaccctaacactcccgtatatctccatggtaggtcaaatcaccgtgcactgcactacccaccccacccctttcctttgaggctgtagttactcagtctgcatgcaaagaaatttcagagtttactggcacaatgctaatgggtttgcccacaaatacttagaagagtattgctagaggagttaatttgcctcttaatgatttaattatatgctacagctctgctgttcaagaataacaatgttcctcgctttcttgctgctgggcctgctgattttggagagttttggaaaagaatggaatttactctcctttagtgagaggggaattgagtttgggaaagagagaagcatttctcccatgccacaaataactatgcccattcatctataatggaatgagggggatatgtcaggatgacagtgataagcattataaaatgcgctgtgatttttatttgcattttctcgattgatcccatgaagtaatattagttctaattttcctataaggttgagtgaggtcacctggattgcttaacacagagatagacagtggatgagctaagggtccaacagaggtcttttgactccaaaacacaacgtctgtttttccctacctgagcctatctttctgcggcttaaaagacctgagttccctgggccctctgaatgggaatgattgtgattttaggatcagagtggctctgtagaccacactctgtacttcattttgtactgcaggttgggttctttggaggcagaattgggagtttcaggtatttattgggattaacacctataaaaagaaggggagaaagcaagatcgggcacaggcagacgttgaactgacatgcaactctgataaagcccctgccaaccctttggggagctctggggctggtattgcctatcagagcatcctgccttggacagaaatgactgggcctttatgcccccaccttgctgtatcactatgggggctgctctgaaagcatgacctgggtgcagctggccctttgcagctgtggcagcccctgcattcaagaacagatggcaaggagtggggagggggtacagtctgctgacccacacccctcagctagatggtaaggcctttcctgaagggaggtctgagctgagcagctcatctctctgtctacaacccactgtttctaggtatctgtagaaacactaatcactcaagagggacacagaagggagagagaaaagattacagggtgcagaatcaggatgtctgagtctgtattccaaatcagcctcttcccaactagggctttatggtaagatacttgaactttgagatcaatccaacctgtaaactggagataaaggaacaattttattcatttatgatgaggactaggaataatttctttaaagtaatttcagtcaataagggctatttttatgaacctctgaagaaagagttcatgttctgggccactcatcagtcttcctaacacccacctgtttatgtatcgccccctggttataagcattttctttctgttcagtgcatcctaaagcgccatgagaatccatgcacttacagctggattttcttctaggctcatccccgtaagatctcatcccagggggctgggaatgaaagagggccctcccctgaacttggagtcctataaatggttgaatcaccaatgtgagagtccccccgccaggagctcaatgcagaggctagttcacctaaccgtttcccttctttactctggtctgcaaaggaagccaagctcaaaggccactggatagagcttggggccagtggtgtctgtgtgcactgcctggcactctcaggattcaggtgagggcagaaggagacccaggaataattactgagtacttattacttgctggtcatggagtcatgcctttgcatgcattgctcatttcatcttcacaacaatcctttgatgaagttattagccctggctgcattttagtgagaagcagaggctcacaaaagatgagggaacttctcaagcccctatagctagtgagtgttggagctcagaattgggctagggcagtctgacacacagctctgagtgtgaggcaggtggggaatttgaagagaattcagcacattcactttgcaggaaactgagaggtttttcagtcacagtgttggtcttggtgcagtagaacatgggtctcttttcctcattttctttagtgagggtagattcatctccaagtctcatttttctattaattctattactcctatatttaatttcattttcctgcaaattagattcttcaacaactgcgttgtagttatacgcatgtttcatatacatatgagaaataaagtttacgatgattatggaatcttagatgaaagacttcactggccatcagcagcaattattccccattcattgggcttttccttctgacgactgtcagtttttatacgctccctgttttcttgcctgatatctagtggaatagttaatcagctttcctcagatgatgtttattagttaaattgacttaagtttcatgtaaggtaatcactgagtgtagaattctaaagtcaggctctcctgggttaaaaaaaatcccagctttgctatttatgagctaatcgcataaacttcatcaattttttaaagctttgcctctcagactctccatctgtaaaatggacatactgttatttatcttgtggaatttttaagtgagataaatttaaatgccttatatataatgctatagtttgaatgtttgtcacctctgaaactgttcttggaacttaatctccaatgtggcagtactgagaggtaggtcctttaagaggtgattgcgtcatgagggctctgactttatgaatgaattaatccattcatagattaatggataattaattaacataggagtgggattggtggttttataagaagagcaagagagacctgagctaacacatttagcccccttcccatgctgtgccctgggccatttcaggactctgtagtccccatcagcaagaagactgtcactagctgcactccgctgaccttggacttctcagcctccataactgtgaaaaataaatttctttaaaattactcagtttcatgtattctgttataggcaatagaaaacagactaagacacatagtaagtgctcaacaaattcttagtaatagtatcacccggttttccgtgaaagataaaggaacagatgtgagattatatttttatttcacagcaggaatgagtactttttgttatttgtatgcttgattttcttttttttcttcaggtcaagaggaacagcatcgattgttaatatgctgtctgctttcaacccccaaaggattattttcagaatgaaatgatctgtggtctttaaggggtggggatgggaggagctgaagaactctcgatccttcgaagaggtcccagtggacttgatttctcagtggaaacagagggatttccttctgcagtgggaaagagacacgaagtgataaaccgagcaccctctttgaagatttcccagtatatttgtccctagaggagtgcgcctccgggagatttattgttggaagcttttatcctcaagcgtaatttttagaagtatgtatttccctagaaacagagtagctccatttaaaagtcacaggtgcccccaagctctgctgggaagattacttcaagtttcatttaatacccatctcagacctggaggcaaattatttagttcatcactctgaaaatggattttttttcccttctacttcccatttcagcacctgccatcttgtggaaagggacttgcttcccaagagatgagaaatggacaggagtggagcctgagtccaagtactgtgatttcttatctcccacaaatgtgcaggaatatttagtcagggagatcatcttcctggagaaattggcccatcctactcctagagtgctgtgttagttgtagttcctccaggtgccacctcgaagaccagggtcagagtacagtcgcttacatgggaggtaaatccacaaaacagtggcggaagagggggaaaatgagacaaggatgggaaggcaatcaggaaagggcatgttatcaagcaaggcactgttctgggcaattggagcttacacctgctagggaagcctgagacagtggggaacatgtacctcacagtgatgctcgtgagggccgggggaactgggatattaatccaccaattccatctgttactgattgagggctgcttactggcggtattgattccctggcacttcaggtcagagaaagccttcggtcatagagaacatgaagccatggggcccagagtgcccagggctgagtggatgtgggcgatggccaatgacaatggctaccaacagtggattggatctttggcatctcatttcttctaagtctccttaacctctgtgcttggtgctgaggtgaagcaaacaattaagatccagtgttgtccttaggatgctcacacttcagtgagggagttgaggaagctaaacaggtaagcaattttgagcctgtgaagttagtagtctacgaagatatatttaagaatatgtgcatcgtttgtgatatgcatattatttgtcaggctgtactctaagcatttaccttgactaacttatttgatgcccacaagaaccctctaaagtgggtgcatttgctgtctcttttagagataaggaagtggaggtatggaaacattaaagtgttcagctagtctgtagtgaagccaggatttgaatacaggctatctacttccagagccctgttcttatccactaggctatgggtcaggctttctcaacctttattattattgccattctgtgctgaataattctttgtcataggggctgtcctgtgcattgtaggatgcttggcagcataccctctaccactagaagccaatagtacctgcctccccacctcctgttctgacaaccaaaaatgtctccagacattgccaaatgcccactggggcacaaatagcaccaattgagaaccactgctgcctattataaggcaatcagtttttcctagggaagtgttatagaaggcagatggaaatttcttttcttgttgtttaatcttccttctcataaaaataaggagaaaagtagtatttcagagctgatcgcatctctaaatcaacagccaaatatctcccagggcagagaaaatggaagtagaaatcaagttattgaaaaatcaacttaagtttgtgtgtgtgtgtgtgtgtgtgtgtgtgcacctgcgttgtaaacagggcatccttgcccactgtgctctgctgccagcccttcgaacaggctgtttccatggtcatttttaaaatgttgtcttgcaacatggtgaactgaggaattagcaaaaagaccgttaaaggagaataggcagtgtgttcacacgggattgtttgtcttattatttttcattttccttgggcgattttatttgtaattttttcggagttttgttttgaactctctttatccaagtaaatacatccttcttccttctgtcacaagctggtggattccaagctttattttccaaatcctcccaaccctattttatccatgtggcttcttggagctggtcaagtctgcaaactgatccttgagattttggggtgttctgtgtgaggacagtagccctaattttggcattaaagcgtccttgtttgtctcctttctttcttcttccaagatactctttaaaaattcagtcttctccaaatttggctttgtagctaatctatgtgatcagagaagcatcattttagtgttggaagcctgaataattcgctttttcagttggtcgtggaagtaaaattccagatgtttaagcattctttgtaacaaagctttttcatgtgcctgtggataatttactaagcagtgctttgtgaatctgcttgcttctctatgacaaatgcttttgatgatcgctgctcatgctcatgctcaaatacatagtcactctaatgacttaaattacttttgcatggtatttatgggaggtgaaaagccaccatggtcaagatcgttgactccggggttagatgggactgggtttgaatcctgacttcactactatcagctgtgtgagactaagcaagtgtgacaggcagagtaatggctccctgaggatgctagtgtcttaatccttgaaacctgtgaatatgttgccttacctggcaaaagggactttgcagatacgattatgttaagaaccttgaggtgggagattatcctgaatcatctgagtggaacaaatgtcatcccaaaaaggaggtcagaatcagagaggttagaaactgctagcatgttgactttgaaaatagaagaagagatgacaagccaaagaatataagaagcttttaaatgctggaaaaagtaagaaaatggactctcctctagacctagagcctccagaaggaacacagccctgctgacaccttgattttagcccaatgtgacccagttttgactgttgacctccagaactgtaagattatgaatttgtgttgttttaaagccacaacatgtgtgctaatttgttatagtgacaataggaaattaatacagcaaagtgatgcaatctctcctaaccattgtttggtcatgtacaaagtggaataataacaatatttaccccttcaagctattgtaaggtgtagaagagagaggcacttggcactgggcccagcataaagtacatatttaaaggtattgaattagtcatgggttttttattttgccataccttagcagttccatcatccttcctattattaagtttcagaaatacttatctgtgatggctaattttatgtgtcaatttggcaaggctatgatgcccagttatttggtcaaacagtggtctagatgttactgtgaagatatttgtgaatgtgattagcattcaaagcaattgcctttaagtaaagcagattgctttcttcataatatgggtggtacctattctattcgttgaaggcttgaagagcaaagactgaggtttccaaacgaagacaccattatgtctcaagactggaacatggaaaccctgcctgagttttctacctgctggcctacctgcagattcagacactagactgcaacatcaactcgtacttgaatttccagtctgcctgtctgccctacagattttggacttgccagcccccacaattgcatgagcaaattaaaaaaaaaaatcttatttctctctccccccatctcattggtctttttttccctctggtgtaccctgattaatataccatccaaactaaatgcaacataccaaaacatttaggagcatgaaaaaagaagaggttagaatgaaaagcacataacattaaaactttctattttgttaagaaccttgcatttcctcgctgatatttaacctgaggactacacctcaggttttttctttcagctttaactcaagaatgtataatttgtattatgctaataacacaaatagtatcccagcaaaaacaaaaccaaacaaaacaacaacaacaacaacaaaactgggatggtattgtgatgtcttttataatggagtttgactttggacttaagagttgatattcagcaaggatgattggtattgccgtactagtttatatgttgctccttctctagtttcctctgaagatcccctacctcatcctggtcacctaaggtcctacactaagactccttattgatcaagcagctatagaatgaagaataaagagtaaagattaaagaaaaaagcctgcacacgggaatgtctgttctgattggttagtgccatgtgagtgctatgtaggttgctgattattttagtatcactcctgcctaaaagtaatagttaaggaacaaaatgcaataaagaattgctcaactatccaaattgttaatatctataaatgtgtaatttcaacagatgtaactagtttaaaggagaaatgggtaaaaatgtgcttatttcatttttcttggataaaattttaaatcctcattttctagccactcttcttaggacttaaatactgtgtctcttgtttacttttttctttaacagacagaagtgtgactattttcaatcggacaaatatttagattttctcctctgaagataagtcccagtgtctcaattgctaattcacttacaattcttctctataaattatttcactattggccttggaagaaaagaccaactcattcatatgactggaatttcttcccccaatttcatagaggaattcattttctaaacacgaggatttgatcaataaacaacttgcaatccctaggaggactttaaagggatttagattgtcaaacattgactcaggatttgttctggtagttgttaaaaattacataaacataagtttttttttaacctccatcaaccaaagagtgagtagtaggagaagagaagacttggacttgttattgattagttgctatacatgctcttccagagaaagttaatcaacaaggtgttgacaatattagcacagtcttacatctctcttggaaattattgctcacaattgcagagttgctgctgcatctctccttcctgccaggaaccaatagaggtgagcttgtttgctgcacaccaacaaattttctaagagcctgtggaccattcccatccaccaactaagtgctgtagtaaagagaggcagaacttctaggccagaagagggaagtcattccctaacacactctccatactaaacttcctgatgtaaaaggccacatccatcttgttaacctaaattccaagtacccagattccatacatatcaaggttatgtgtatagaaaaaaatatatggaatgatttggtttttcctatatgttgaaatcacattttaggaaagtgcaacttaaagtaaaaacaccatctgtcagtgggaattatgtagtctttgataaatgttgggagtacataaaaagaaaacacaacttatcaggaatttatacataaaaattatttttaggggaatttaatttaaaacaaaagatgagccacattaaatcgattaatattgccctatacatgttaaatcttacttcagagaagttatatatataattaaaaaatgcaatattttatgtaattacttctcctttaaaaggtgaactttgtacttctgaatgatgagatcaaaagagccactaagctctgctatcaaaggcagaaatgatgcaagggaattccctagaaaggggaagttatacagttgaactgtttttacttaacaatgcttctgacaccaaatcagaggtttcttttcacatcaacgaattatccaattctctgaacaccagctaggtgtccagtaattcagttgatctctgacaccatctacctggaattagcaacagattcaacaagttaaagggctcagacgccaattgcaaatcccaggtcacctatacttctgaccaaccagctgtatagactgggggttcccacaactctctcctcagttttgacagtttgctaggatggctcacagaagtcaggaaaccacttaacttacttctgctggtttattataaaggataaagatgagcagccagataaagtggtacatagggcaaagtttagatgaatcccgagtgcagcatctctcttcatggagttgaggtgccccaccctcctggcacacggatgtggttgtgaactggaacgctctctgaacctggtcattttgagtttgtaatgcaggtctcgttatgtagacatgattgattaaatcgttggccattgatgattgactcaatctctagcccctttcccctccctggagggggaggttgggagctaaaagttccatgcttttaatcaaggcttggtctttctggcaactattccccatcctgaagctatctagggacccaccaagagtcacctcatttgagcaaaagatgctcctgtcacccttattatgcaggaaattacaaggaacttaagaaatatgtgtcaggagccaggacaaagaccaactgcctttctatggtaccccagtagtgcagagagtggaaggcaagctcacagccagctccctcaagtccatgttgacatttgggatgctaggtgcagaaggaaagagagcagttgcagtctatcggagacctgagaatgataattcttcaagtggataaggaaggaatagaatatggactgtattccattaagaatcttgacttttactttttcaagacaccattctttcgcttcttctagccaaagatatcacatagcaaaactgtgaaatagggcttaaacaggtaagttctataagtacaaaataacataaaaatgagcaataattaatatggttctccagtatctactgcattcattaacaaggaaataataattttcaactcatcctcacaacctcacctcaatgaaatttcctctctgttttatttctgataccaatttttaaagttgtttcattctcttcttactctcctacttatttttctaacattgcttcccctgttaccctctgtcactctttggatttttagtgttgtatttatgttttcaaacatactaattagttaattactatttaatccttccatttggtgcccttggcaccttattcccctcaccctagtccaggcactggcttatgctgtgccagccataggaaggaagaacaagagccatttagtatagtaagtaaagatgacatgactttttaaaataaaatggaatgatgactgttttaaccttatgctcctctctttccaaggataaaatattaccattacttatcaaaaattaaaaacaagtttaaattgtgggtaaggactgcctaagagcaaaatttttaaaaaatggttaaaaatcacaaaggaaacatcaacaatttaaataaattttctatactttgaaagcaacatagaccgcattaaaaagcatactataaacatggatagataggtgcaacatatgtggcacatgcattgtaaatatattgactattgaagaactcatgtgaaccaatttttcaaaactaaaacctgtgggagaaacatgggcaaatactccattcacataagaggaaatacaagtggctagtaaatatttgaaagtgcgtgaccctaacaagaaataaattcatattaaaaaggtatctttctgcctattctataaacaaatacagattttaaaaaataccagtgctggggaacatttggtgaatctactccaggagtgccaaatatggactatttttatttctcatcatctccccgagatgaaattaccctttgctttatctctctcctgatttagctcctgtggggactagttcaccaatcataatttctaggaccttcatgttaaatttatatttagagtctcttgacctttccttgtccctgtgcattggttaaggctgccatatcctatctaacagttttccctaactttaccctcgaaagaggaactttgtgaaagctgctttacttcctccctggaactctgcctactaagggaggaggctgccacaccaggtgaccatcttgtcgcagtgtacttggaactttcccagttttatcactgaaaatccctgagaaaacccaggcaaactgagatattggtcacttttcccatgtgacattaaatagaagatcctggtatgcccctttttcaatatgttagttttctagggctgctttaacaaaatattataaaccagatggcttaaaacaacaacaatgaattctatcatagttctggaagctagaagtacgaagtcaaaagtgtcagcagcatcatgttctctctgacagctctaggagagaatccttccttgagtcttctagcttctgatgccaaggcaagcaactcttggtattccttggcttggtagatgcatcactcccctctttgcctccactgtcacatagccatcttctctctgtgtgtcttcatataatcttatctctgtgctgtgtccaaatttccccctttgtatgaggacaccagtagtattggattagaacccattctaataacctcatcttaacttagttgaatttgtgaggaccctatttccaaatagggtcacattctaaggttttgggggttagaaattcagcatatctctttttggaggacacaaatgcccagtcctgcattctttggttcttgtacaatgaattcttcagtgtaaatcatggaaagttgtaagtgcaggattgagacatttgtacttcatccactaggcatcaatgagtcactgatggcttctgaacaaagaagtgacatgctgttaatgtcatttgaacaacattaacatagaaatagtgtacatgatggattggctcatgatggaagctggttattaggaccatgagaaatctcctgggcctagcgcccaactacaatcactgcctgctgctgagctcagccttttgttcgggacagagcacgcatcttctcaaaccagaaaggcctataattgcagtatgtagacattctttccagcaatcagagctcaatcctagttgatctgcttctaaggggtactgctctgtctaccctcttgtgaaagactttcttatcaaataataggtaagaattcaatttcttacctatttcctcatgctcaatccatgtcttagtctgttttgtgctactataacagaataccacaagccagataatttataatgaacagaaattgatgtggctcatggtcgttgaggttttgaagtgcaacagcatggtgctggcatctgatgaggagagccttcttgcagcgtcataacatggtggaaagtatccacaagggcgagagagagcatttgagggagcacaagggagtcaaacttccttttataacgagctcactcttgtgattctaaacccactcctatgaaagtaacattaatcccttcatgaaggaagagccctcatgacctaatccgctcttaaaacctccccacctctcaaaactttcacattaggaattaaatttccaagacagggactttaagggacatattctttttatttttattttttagatggagttttcctctgtcacccaggatggagtgcagtgacgtgatctcagctcactgcaacctctgcctccggggttcaagcaattcttgtgcctcagcctcctgagtagctgggacgacaggcacacgccaccatgctagctagtttttgtacttttttagtagagacggggtttcaccatgttggccaggctggtcccggactcctgatctcaagtgatccgcccaccttggcctcccaaagtgctgggattacaggcatgagccactgtgcctggtggagggacatattccagccatagaagcccacatgcttatttcttcctgcctgtcttaaatctttcagtgtcaatgttccctcctctcccccagtggccattcccatgtgtatagccaaccacactgcaacctgcactgcatctgatttctaattggggcatactttcttcttgccttcgtggtctttgagattactttacattcttctcctcagtcgcattcctttgactttgatcatggcattttactttgatctcaagattaaaactcttagttatgagcaaattataggcttgggttagcatctacttgccatgatttctggcctatgtgttaccttagccattttttcttgacaatgtaactcttgcgttttcactctgtgaagggattttatttcctggctccctgaaaattagcagtcaggaaagtcttagaatattgacagtggaggggaggatgaggttaaaatacccaatacctaagattcgagcatcttagcccattgtattcctttttcttagcgaatctgccctatttatggcttaagagcattagccttgaagcctgatctctgatgtcagctgcttgaacaaggaatggacacccagccaagactgactataaaagacagtttcttcctccaaatttagaatgatgccaagactggattaattaactggagtgaagctcaaacttcacttcatagactcaaggtttaaggctgctgttttggactatctatgatgggttacctgtaagtgtgttgaacatatgagcccctcttcaaaggataaagaatgagatatgtattcattcacttgacagatattgactgaaaacctactaaaatgccatcgtctgttttaggctttgaaattatgagagtagcatggcctaacttcccagaatgtgcttaattgaggtgagaggaagaaaataaataaataacgccatctgaaattatgttacagagtcaaaggcaatgaagaaagggtaagagaataaggagatagagaataggtagaaattgggggcaggggaccttgctactttagatagaatagctgcagaagatatctattagaaggtactacttgagtaggaatttgaataaaatgagagagtaagccacaggactatctggggaaaagacgttgcaggcagaggatgcaggtgcaagatccatgagatgtgagcatatatagtggggcaagaaagcttatgtggctatagaagtgagagggagggagagagttataaggtctgagacataagcagtggccagatcaggtcactgtcatcatggtgattttatttaaagcatgatggaaaaccatggaataacatgaccagatttatatagatgtgatttttgtttgtttgtttgtttttcttgtgacagagtctcaaggggactggagtgcagtgctggagtgcacccagctggagtgcagtggggcaatcttggctcgctgcatcctccgcctcccaggttcaagcgattcttctgcctcagcctcctgagtagctgagattacaggtgcatgccaccacgcccagctaatttttgtattttttagtagagatgggatttcaccatgatgaccaggctggtctcgaactcctggcctcaagtgatctgctctcctcggcctcccaatgtgctgggattgcaggcatgagccacagtgcctagcccagatttatattttaaatggttcactcttgctattatgtgaaggacaaatgatgagagaggagtgaaagaaaggaggagggagagagaagaaagagttgactacttgtctactttataagtcctataagtcttcgctctgtcttctctggtctgagaagttcttgtgcacacttaggatatataattccttacttggttaaattaagtgtatttctactttttttttttgaacaaccaaattgctccctgattaggacactctcaagaccctgaagtatggtgagataatacatgaagagaggaggggatgactatgaaacataccatggtgatacatttatagggcctaattatgtactattttcaactgggtgctgaaaacataattcaatttatggaaagactcattctacaacagtagtctcaactgaggacaattttgccctccagaaaacatttggcaatgtctggagacatgttttgattgggaggagggtactgctggcatctagtgggtagaggccgaagatgctgctaaccatcctgcaatgtccaggacagcctctcacaacaaagaaattttcatctccaatagtcaacagtgctgaggttgagaaacacttctctagaatattgtggaaacaaacagaatgcactcagacacaaacatgattatttgtcattggggcttcttggacctttaagatatctcctctaagttgaaggaaggagaaaggataatgaaaaatatacttactggctgggtgtggtgactcactcctgtaatcctagcactttgaaaggccgaggcaggtggatcacttgagatcaggagtttgagaccagcctggccaacatggtgaaacccagtctctactaaaaatacaaaacttagctgggtgtggtggcgtgtgcctgtaatttcagctactcaggaggctgaggaaggagaatcgcttgaacccaggaggcagaggttgcagtgagcggagatcacgccactgcactccagtctgggcaatagagcaagactccatgtaaaatatataccagcttaggtgtatggatattactgaacgtggcctctcctctgtggtccattggtctatcatcttgaagaagtgaagtaccttataagaggatcagttttctagatagaggaggaggacccactcagatgctgataataaattttgagaatggccatcttgcaaatgcatcatttcctaattcataccctttgctgtagttttgcagataggcatcaaatattgccgaattaccatcaatggttcctatagaagacaagtgcaaataaaaagcaatcagattgatgccaaatatttatcattaatcttcataaataagtggaagtaaaactcattgtaagactaacttaacaattttccctttatgtcacattgaagccttaatgtacttgcaaattcaattcagtaaataaatgtttgttgaattgcaaatcagtccattttgattcttgataaagaagtgggagaggaagagactgactggtgatttcaggctgggattcaccatataactaccccagaggagaaaaaagggccagaataccaccaatgcaggcagagtgttcacctctagtggtcccagaaccttcattttatctgttcacttgggagaagattggtgttgtctcaccacctttacaaatcctcgggaggggatgggggctgttacctggacgtatttctggcaaatttaacaaatctcttttacacgttgttatcatcattcttttcctgtacattctgaatgatagttatgtatttgacaaatatttattaagcatctactgcattccaggtacatatctgtgtactgcagatgcaacagagaacaaaataagcaaaactttcagatctcctggagcttgtagtctaacaggtgaggcagacaataaaccagatgtttggctaaaatatgtgtatttgagataataatatgttaaagaacaaaatgaaggagggtggcgagtagggaatttctctggctaggataagagggttgtaactttagataggttggctagggagggctgggctgagacaggtcttttaagggaagattgtaaagaagtgagggaacaagttctgaggttgactaagagaggcaacttccaagttcttggaagagcacctgttagtgctccaagaaggatccatggctggtgtcttgggaacattgtgtttctggttggtgcgcctggagtaagtgaaggggcaatgggaggaagtgggatcccggtgatgcaggtctcatcggtcattgcagcgatgttgactttaatggcaagtgacatagaggccagtggactattcttagtagaagggtgccttgacgtgagttgcattccaacaggattattttggctgctgtgaagataacatgatgtgggtcaggcaagtgaggagtccagtgtcataatacataggagcaacattggtggcttagacaagggaggtagaaatgcatggggctatttcccaacacaatatggttcttttgtccacttactcttgtttctttatttttagcaatagttactaattcataattcctgttgacatttcctacactttcatgagtttcttgagccctgtctgtttccccggttcattattatcaaacagctcagctgtgatagactgctgatcttcattttcatattgattaatttcatttttgcatgcatcacccgcatttccagcatcttcagcacagttttcagatgatgagtcatttgcgaacgacagattttcattataggagtcatctttggagcaggatgtgttggactagactcaggtaaaatgtttgctcaattctgcttagccctctctctcatgaaatgggatttgatgggtgtctttgagcccgaccactgtcgaaataattacaaagctgttttctcttatttatttgctgatcaactgggaattgtgttgttttacatgggaaatgtaattccagcagtcactacttttaaatgaaatgataactcttctgcattgtgattatataacatgctcattatgaactgaggacgttggtcccttgagtctgggttccagactgggtcagtggtgggaggaacctcactccagctcaccccaaattggttaacagaggtctttcatttatggtaggggttgcaaattgaaatacttctcaagattcatcagccaatgtaactgggtgaatcgggcatatgtaagaaaacagggactggagggtactgtctcactgaactctacagggataagccaagatcagtgccatttgcttgttatcctgcctaaatgtggtttcagtattaacaaattgccttaaaagaagccagaaatctggattattatggacactctgatatttaattttttttcacgtttagagcaacaaaataggcctttgaaccggacccagttcaagttgtctagtttgtaactccttattcacaaagatacctttgcactttctgtacttatgatgcttcttttacctactttcagtgagaacaacgatatgggactctgtatagttgaagcttgctataacagacagtaaagaatcttacttaggaaaagtaacaaaatactttttccttctgctataacaaaataccatagaccaggtagcttataaacaatagaaatttgtttctcacagttctagaggctggaaagtccacgatcaagccatcaacagactctggatctggttcacagatggcaccttctttctttgtcctcacatggcagaaggggaaaatgagctctcttgggcctgttaataaggacatgaatcccatttttgagggttctgccctcatgaccaaatcacctcctgaaagaccccaccttctaataccatcaccctggaggttagcatttcaacagatgaatgttgagagtcacaaacattcagaccacagcagggtggttatctaacatacccatgttctgacactggcccctggaggactgagtattgaatcctggcctgaactgacccttaggctcttggttctgtgctacacttcccaccagtgagtcgatggtgttagtagaattgaactcaagaccctgacttcaaattctgtgttccttccttctttcctggtccttcttttcttcaaaatccagtgcaagtatccacttgagtcaagcttggagcaccactggtttataaggaaacttcttctttggatcatcttttcatggccgcagtaggatttagaacaaacccaggatctgaactgaaaccaatgttgtccaatctcagtgctacagctagtctgcttggcaaccagagcccaggcaccgtagcctctgagacttgtgctgcagtcatttaggaaaatctgtcttgatctatttgtctctgtctctgtccctctctttctcctcaccaatactgtctccattttaatttttgaactttcaaaaatgctttagttattactggtaagtataaaagttgtgctaatgaaacatacatctagaaaaaggtcacctagactttccaaagtaaaaattgacttcatgaagagccagcaccaccagctttcagccctggatagtgctgctaaatgtacaccttaaagtgggtaggcattagctgggatcatttgagatgcagattctgattcagtaggactagggtgaacctggacttctgcttttcttaggagctcctggtgatgttaatgaggctgatctgtggaccatactgagtagcaaggctctataaaattgctatctcatctctctcttcctctctctcttcatcctcaattatatgttttccttcaaacatcaacattcagaataaatgagaagtcatgttttattcaatatatttatttttctgttttgtttaaaagtgactacattttagctatactatgagttaaaaagactttctgtgtgtgtgtaaggagggatagcttttccaggaatgaaagtaccattgagaccatactttgcatgatcccagatcaaaatggccaaaataaataataattataaagatattcttattatgataatgtttattggacatattctttgttaagcactgtattaatgtttttaatgtttaacttagtacatctcgttgttcatgataaccatatgggttgggaactgttgcaccgatctcaagtttataaacgacacacacaaaagcagggtaagaaactctaaggaactggtccagggtcacagagcgggaacatggtagaggcaggattcaaccaaggcctgggattattcaaaacttcaaatcctgcagaatttgggggcatgccacctgcagactgagtataccgtgtcctcaatgaaaatgacagagggaagtgttttgttggtatcagccctaaggcttctggtcttttcttgttgctgggttttccagagagtgtccagcttcaacctgttttctggagtactgggacaggtatctgggtaccagaagtgaccacaacaggatatagcaggtgaaggttagcccaaccaggaagtagactaacagttgaaagaggttctcaaaaggcatgaggaatcaaaagaaaaatgcatgagatgcatttcctaaatagtccagttgttggggttctcccatgctgaaggattgaggagagaatatgatcaaacccttgctgaggatttggccattgacatgggcttctggttaatcaggccgtttcctaagaagagtcaggtcaataccataggcaataagggtccaggtgatcctgcggacagggcatttagggaggcagctgaaaggccctctaccaaccaggcatgagacaaatgtgattctctgccatccgcaaccagcccagagagcccgtcaccaccaacagtataacaaaatgatgaagagggtgagctctggagccagactcagctattaactggcctgggtccttgggcccttgtgatactcaaattcttcatttgtaaaatggtatcttcctgatgggaccgttgtgagaatgaaatgaggaattatttgactattgtaagtggactagagataatccctaattttcttcactgtaatatttctggacataatgtttctttatacaaagaagggactgaataaatattaatagttcttacatgaatgatcaaataaagaccctgctcataaaagcacttagtacaggacttagcatagagtacaaactcagaactttgctagtataaacatgaaatttcacacatgagaaagactcattaagaccgggtactgtcagggaaacccaacagttaggaaataattttatgatgcaagctaatgtttaaataatgcttactgtctgtgttagacactcttgtaaccaagcatttaatattcatcaatacactaaattctctagacacccccatgatgtacagggtatttttacacacccacctcatcttgcagatgagaatactgaggcatagagaagaaaattatgtcatttaagaccacagatctcataaatggcagagcttggatttaaaaccagaaggtttggctccagggtccatattctcaatcactatctaccattgctgttcatttatgagacttccagggtgtgaggacttgcctctagccttgtacctctttgagcccaccctcatctccattccagaagtagtcgggctccttggaaagagaaccatgttagcagggaattgtctgtagaaactggggaagaccatgtgggctaaactggaaatgtactttttcatacaaatgctttttaataatcaagcataattaagattaattaaaattaaattatggctccttttccatcacaaaagctgtatttctagttgttcaatggaaagatcatacataaagaatgcaaaaaaaaaaaaaaccaggtagtatttggcaacactggtcataaaaaagaacaatgaaaacttgtttatttcttaactaaaataaaagtggaaagaagttggaagatggtgttttaggaagttttaaaaatcttctttataatctttgttttttaactccataataataaatattcacaatattttaatgagagaatgtgtttttataaagaatcctcccatcatggtgataatagagaaaccttggttattgactctcaatgacagcttgtaaatgacgtatagaaaaatctgaaaaacctggaagcttctttttttttctttgaggtgaatccctccatctggctctagatccagtctatcctacctttcagagatatcaatgtataaatcatctcctcctcatctcattcccctttatcaatttcctctcatcagcattttaacttgaacaaaatctctgccatcttaaaaatgcttcttttggtcctatgtttgcccatattgccctgtttcttactcatactgaatattattttgtactattaaaatgtttatcatttaataattatctaccattttataactaaatttaactcatttatatttattaattgaacatctatataccattgcattgatatctttcctttactaggtatatattttttaacttgactgttattagtggattggatttacttatttttgtgtttatatagtagtttcatatagtagtttcacagttttatattttatgtctatgttttgacgcttatatgtacactttaaatcacatacacagaaaagtatctatccagtgtatcctgagtcagtcagtatcctctgagcaggaaagaaaccttagtatgtttcactcttctccagtctcgcttccttatctatgatacagtgacctttcaaaatttcaattccagaatcacattaaaactattcacactttagaagcatttggcttggctatgcttctatccagcctatcaaagtgtgaatgaagaggttgtattaattctgccatcttttaaagttctatttcttttttttcctttgtaaagtttttatacattttcacttatttatttttgttgtatatatttgaggagtacaacatgatgttttgatatacattacacagtgaaatgattactatgggtaagtagattaacgtatccatccccttccttatttgcctcgtttttgtggtcagagcacctaaaatctactctcttagacaatttttagtatacaatattattaactatagtcctcatgctgtacattagatatctagacttattgctcccacctacttgcaagtttgtacactttgactcatcaggtctcatttccttctcctccctgctcccgtaaacactgttctactctctgtttctatgtattcaacctattttttttttgattgcacaatttgaccttatgttttactggtttcttgttttctaccctttcttgtatgtcattttcttctaccatagattctttggtaattttcctgtggcatatcttcaaggaactcaaagagactctgtggatggtaaggtttctgatttcttacgtgttagcaaatagtcaagcgcctgtttgatcagatccattatcttctatcttacaatgttgtctagcccacaatgatagctaatgacaatcagaactttagcctttaaagggaaatgactttagcttttatattttcaggtttttatctttagtttttgttccaacattttatcataatgtttatagggatgggtcttttattgccatcagtttttctgttgctgaatgttcaaaggccccattcaatttaaagatactttttattcttcagctctagaaaatgttcttttattatgattatttgttatataattttcttctttccttctagaactcgttcttgagaaatagtggaaattttgggtctatattctatgcctttaaaattatttttttgcatcaccgtgagccaagatcatctcctcatcccaagatccttaactaaatcatatctgcaaagacctttttttccacctgaggtaatatttacaggttccagacctagtatctttgagggtctttattcagtttcataagggccctttttgctccttctgattgtagaccctgaggctggaatgttattatgcgccaaaagtcatgacgttgtcctcatccatctgatccagctttgctcggctttctcacgttctccaccctttctcctttttccccgccattttgcttccttttcccacccattcaatctttccaagcacttacctcttttcctttttcttttccactccccctttctctcctccttccttcaccaccttcttctttcccctcacttttaccttctttcccttccttctttcctttctgcattcttttcccctctactcctcctcatctccttggtgcctcccctccaccttctcattccccctttcccatccttcttccacttcccttacatcatattctccttctcacaggttttctctgcctaatatctctacagctccaatcaaatattctcaccttgaaccacatcaggaattcttcatcatttctggtttgctgaatttattttttgttcttgctttctaggatcttgattcatttaattgtaaaaaagaaaaatcaatttctgaagttacattaagtttttgcaggttggctggacacggtggctcacacccataatcccagcattttgggaggccgaggtgggcagatcacttgatgtcaggagttccagaccagcccggccaacatggtgaaaccccctctctacaaaaattacaaaaattagccaggggtggtggtgcctgcctgtagacccagccacttgggaggctgaagcaggagaatcacttgaacccaggaggcagaggttgcagcaagccaagatcatgccactgcactccagcctgggcgacagagtgagactccatatcaaaaaaaaaaaagtttttggagtaaggaataatattctttacaattttaatacctggaaatgcctttttatttacgatatttctttagactgtgaacctctcataggaaagactcttccatatttgtttttatttacttaatgcccagcacatggtgttactcttacatgtttctgaaatgcatgtcattgtggattttgtgtaatgaaatgcatatggttattttaactgatcactcaagttgattagactgccacatcccacgcaaaaagagggtgctcagaaagccagtgattggataataatttgagaatactcaagtttctagtagtcctaatcggttgaacctaaaaatgccattaaccctttctcaaagaagcagattggaggtgagtagcagttgtgtggctttttggtatgcagctgttcactttcaaaacttaatttaaaacaataaaaaatagacctcgaaatcattttgtttccctatttatttaatgtgatttattctaaatgtgtttcatatcaccataatgtatcggagctcaaccaccacctgttattttgtaggggaaataaacaagacctctctcatcagatgagttaattacactgacatattcactcctccccagagataccataaactaaaatgctgcaaagctttaattcaaacaagcaggctggaaacaagagctattgcagtggtataattttctttgggagaatcaaaagctcaacacagacttgaacttcaggggcaaaatagctggagttgatcaaatggaggcttgtctagggtcgcataataaatctgtaggtgagttgagcttgaacccatttctcaatattatggcactattttccaacctttgtgcttctgagcatcatgtggtcatttttaaaacttgtttcatcccgtcatttctccctcctctcaggtatttgtctggggctggctgtgcacccagaaggccattcgttccatgaagaacatgacagaggtacctggtcctacctggattcttgggcatgcgggcagcagcagcagcagcagccacagtgaacttcatcctaaggaaattaagcacacgttgcgtgaggctgctgtgggggtgccaggtcagattctccagtggtagaacctgagatgagaattcatgggcaaggatttactgagaatgttcccccagaagaattgtgtagggtgatgggagaagcagcccagggaagggaaaggagccagccaggcaagatgtgacttcaggcaaatctcagcctcagcctgatcctatggggagctcaggagtgtaaatctccccccagatttttttctcaactggcagaaaaagaagtggggtttcatactccccctacaattggtccttgcctaagagccactgggagaggcataaactcccaggcacttctggttatcttccctgtaagcagagcagccctcatagcctgcggcagctccttaaaaagaatcacaagtataggaaagtgcccaaagaagggggggaagtggggataggacccacaggagactgtaagaaggattcaaggtggtgtgagaggagaacagccgagtctgctgtccccaataaggagtattgagtactctgtgcctacaaggtgggagctgggggaggagccccaccccaaggcagagtacctacagtctatatagattttaaggacctctaaaatatttgagatctaaaaactaaaaaaataataataataataattttaacatataaaaaattcacttgaaattaatgcatttattaattcaaccaatatttgctagatatctactaggttccattctgttctaggtgctgaggtttctgtagtggataaaacacaaaaataccagccctcatggtgaaaatggaatgacaataaacaagataaattagatctatggtaagataaattagatctatggtattgaggagggaggtgggacttgactctggaggctgggctccgatgacaccagaccaaattgaagactagctaaaacagggacctgacggaagcagctttccataagacacctcacccgtctgccatgtcaggtttaccactgccatggcaacacccggagttaccacccctttccatggcaacgacccaaggatcccaaagttaccacccttcctctggaaatttctgcatcaactggcccttaatctccaagtcattaaaagtaagtgtaaatatggctgcaaaactgccctgagctgctactctcagcacactgcccatggggtagcccaactctgtaggagcagtcacagagatgtaatactgcctgagctataacactgccacttcaataaagctgttttcttctaccctaccactggctcacccttgaattgtttcctgggtgaagccaagaaccctcatgggctaatctccaatccggggttgcctgtcctgcatcagcatcctatgttcacaagttccataaagaaaataaggcaggggaggagaagtaagtagggtccatggtggtgtgggcaggtgtgagttgtacttttaaatagggtggtcagggcagcattctccgctatacgtaatgattgctgggaacttttgggcaaatgagtaactcgtaactaaataagtagcttaataaacagtctttccacttgtttttcacaaaatacatttcagttaatatgcaatggaagcggggtcacatattgtacaattccagggagctccactcaaaagtgggcttgtcaacatggcagcccagggagtgagtgcattttaatattcttgacataatacaaggtggtacctcctatgacaagaatggccaggattatgaaagtcttaaaagagcccttctcactttggtcacctagcattgcaggtctgcaagtcaaatgacagggcaccctaggaaaagtggtgtttgcaaactgaactcttggaggtagattgataaatccacaaaccaatttattcatttacagcaggtgatgtagctggcacagtaactctgtcagtctctttcctggtattgacttacctgaggaaccaaattaattatcagaaggttgctctgctaagtatggaattagaaagaaaggaaattggatggtcttaagggattgttcttacaggcttggataaatcctgataaattgcctttaaagagaaaggaatgtactgctctttgagaacctggctcagtcgtcaccaccttctccttgaactctgatgctgacccaagtttgtcatccaaggcttttagtttatacttgttcttatattacctggtttcaaaaaaaaaatctaaattgcattgtaaatcaatgagattttaagtgtgctgtgttctgactgtgtccagggaggtattttaatctcatggataaatggtaatctttcatcagagataatttcctctttttgatctttctctttattcctttgtctgtcttgcttttaggtcctttttcttttttctcatcaccatagcaaatgtctcaaaaaactgtggttgtaaaatatgcagataacaaccacgcctttatttcatcataatggttaggagcacacgctccaggtaaatcctggtccttcttggtggctgtatgatcttaagtaagcccattttgcttcaattttcttatctagaaaatggggataataacacccatgttatagagttattctgatgatttctaagagtctcagagacctaggatccacaaaatcaaaagtatgttcataaaaatattaataagtaatttgccttttcatgagttgacttttggaataatggtgcaagatcaatgctgggtagactgtggtgccttagtaccacaagtggtactaagtggtggcaccaactatgctagaagtcttggtattctgcaccacagcatacttgcgggggaaaaaaatgaaacttaagagcagacttgatgaagtagtaacatttcttaagtttattaaatcttgatatttttaatgttctgtgtgataaaaagggaagtgtatataaagcacttctgctatataaggcatgatggttgtttctaggaaaacacttgtatgattgagttgggagctgaagtagacatggttttcataaaacatctttatttggaagaatgactgacaaattatggtaattcagacctcagaatctggcagattttttttttttttgaaaatgagcaaaataagtatcactgcaaggaaaacagcaagtggtatttgttgccaattataaaattcttcttttcaagcaaaaatgagaattttgtaaaagttaaactcaccactgtgagcttgacagcttccccatgcttaaattcctttctgataagaatggtggtgatatgaaatatgtcagtatctggaatatcttcataacttgctaagtcaatattttccaaatgaccaatgtgtgatgttacaaaatcatgcatgcattaaaggtctattcaaattgcaagatagaccaaatggattttaatgtagcagagtatgaaaagtctattgaatatgatttcacattccacattgtagtaacctttaaaaaattattacttgttgagttttggtgtagtatcaaagaagaaaatccctacttatctgaaaagctttttatagtactattctaagtacacacatgtgcgggactggattttcctcatacgcttgccttaaccagaacaacatattattacagacaacacagggaaagatatgagaatgtagctcttttctacaactaggcattaaaaatatacttcttactaaatattttttgttttggaaactatagttatccttttataagcatatgttgtttatattaacatgtaatggattcagtcatttattattaatttattattttttagcatgaatttataaataaatatattaaaactttcacagttttaatttctaccatggcaaatattgattgcgataagccatataaacaaaaactctctgggaagctcaatgatttctaagagtgtgaaggcatcttaagccctaaaagtcttgagtgtcactgatttagaacattgcttagctcatagtaaaaggcatataatccttaacacttttattggctaattattcacacacctagaattacttgttcccaaagtatgtataattttaataacagttaacttttattaaagatttactttgtgtgtgccagacactgtgctctttgctttgcatgtattatctaacataatttttaataaaatgtgatgagataggtacaaatgttagttttattttatagatgagggaaatgaagtatggagaagttaggtaatttgaccaaggtcgcacagttatgaaatagcagaaatgagaccccaggcagtcttgattccagactgcccctaatgactttttttctgtatatttgagttgtgtttatattatttccccatttaaatgctctgagtcccccaccaacttgattgtaggatcagagtccattcccccgactcaacccaagcaagtctccctggtactttctaggaacttccaaaaaataactctctcatggagccacagtcaagtccatcagccgccatcctccacgttctactctattccaaccactctctggtttccactggctacaaaaccagttgaaggagttttgccatcaccttcctaatgatgctcttcatatataaactattacctcacaacctctgggacaccaacaagtgctggttctatcaagactggctacataatttgtaggatccagtgcaaaataaaaatgtggggccttttctttaaaatttatttaaataactttaaatgttatttaaagtctgcaacagcaaagcattgatcaagtgtggggttccatgtgaagtgctctttcagttgcatgcctggggaattggctatgggttctctgcagagatgggaaataccacagcctgtctgaatctgtcacagcttatgccccttgggcatgaaggcaggagcctgcagctcatggcctcacatactttcttgtgaaaatgagtcctgcagcttctagtcgttagtcctctagccagagatcatcgaatctagtctatagggatggaggcgctgatgccttgacactccttctgctatcttgtctttcctctccttccagcaacaaaaccaagcctttgtgcacatctgtggttgtgaccagttggagagacattaggagatgagatactatgttcactcctcacagctgtaccagggacctgagatattccgtcactattctatgagtgagtaaatttaatatgtggaaagaactgagaactttttcttaaaagcatgaagagcaggactttgtcaggttatagagaaatcaaactatttttttctgaagccaaagagggacactaactgccttatttaaccaagccatgggaaggatagagcaggctggtttcatacataaatggatctagggccttagcccagtctgacagtcactgtgagagtcttaccctgtttgactggccttgacttcagacccagagctatccctggacccatcactgtggccaggggaaatggtaggaccattggcccagattgtgcccactcatgtggtcaggaagcgggcaggagtgctatgaccatctctcaccatggtgagatgggatagtggagtaggagccatttgccccagaaagtagtaactattctggatagaacctttgtggcaaagccatggttcttctaaaatagcccttgcagaaatgtaaacctgaatgtgggcaggcagaacaatgagatccaggaaacaggattcagtttgagaaaatctggtttattagcaactgacatcaggtgagtgctgatgcttatatctccaaagcaaaatttgggaaaccagagaaagtaaggtcaaatcagtagaacctcgttatcctgagagacacagggactaatccagtgaataatgttcatgtgttaggattttggagatcccaccagtggttttccggtgccagggtatgagaagatagtctccatgtccaaactcacaatttcagaacaaatttcatcaagataaaggtaaaaacaagccatgacctgggaattttgtcagtcagatcatattgcagaatttatttattgcatacccatgtcttacagcaaaaggcaaatatgcaaaggacactcaggtatgaaaatcacccctcctccacgaaccggtggcctatgaaagaggaacccaatgaggaattggcatacgtctgtttttatatttcctttgttttgcaccaaaggtcatatttttgcaatacttcgcaatatttttgcaatattttgcaatattttgtctatatttgttcccccaacacccaaaatgaagggagctgatgaaatagaggcaatcaggaagtggggagggtcactttcttaggagtgggtggaaccaatgagaagctgtctgatttgcagtggttcagtgatttcttaaaattctttgcagggctgacctatttctaattccttgagcctatagtctgaaaggtcattaatctgggctcggctcatggtgctgaagcttaagacttctatttcttaaatgccaaaggtgtgtcaggttgccttttgaaatgctggtatctctattcaggcatgcagtggttagtagagaggtacatcagcactttcctttgtcagggaaacattcacccaaccaaaggaaccacctgtgtttttagtttttacttttctttcttttttttttttttttttttgccatttggatctttgccatggattcaaaagacaaaccaatctcccccacacactttcttttttcttttttttttttttggtcaagtacagggacaaactggtatgtgtttgctaatgggtaacagcatcaaatgtactttctgagagtcaagttggaggaaaacatgaaaagtatcagtttattcttgtcactttatgtctcctcattttctatagaatgaaatctgagctctttgttgtcacatatgaggttctttctggtcctctttctgcttccttcgctgatcttccttcttgcctctccccaaacttacctttgacctctaagaaccagtcatgtctcggttcacatcagggcctttgtaaatgtcattcctggccctctcacctggcggattcctgctggcctttcgggtttcaactcagatggttgcttcttcttcaggaagcctcacctgactccccaaccctgaaggagggacttctctttggcgttcccatagcaaccagtgcttgctgcaggaacgcacttcctctgcatgtaattgcttgtttatctgtctttcttccctattatgccttttctggcttctttcttttcctctttctctttctccttcttctccttcattttaatgcattttccttgcatgaaatccaaacatcacagataaagaatgccatcctcctgggccacgcgtcagatctctttcatgtctctctagatacacttaccagtcacttactcccacagtgcgctgggagcctgaccgtggggtctgccttgacagacattttgccctccagcttcctattgggcttggccactagggacacaaaagaaggtcagagggtgggagggaaagggtttgatgtatgcgtctcctacttccctccccgccacattcccacggctgattgtgtccctctaactaaggctctaggtctcctcaggtgtccctcttcctgcagtcacctcttgggctctggtggcactttttcttcttgtccttcaggcctgggctggtgaatggttcctgctttcactattccagatgtccagctctgtaccttgctgctctccttaaagcctgcctccctctaggtaaggtgtccctgtattaaatgttccttccactacccagtgtacatgtgcattccatcatgctgagagcctcactgattctgacaatcacttccaactctagtccttgccccttcctcgagttcacccagttataactatgtcttctagaatatcacaaccctagatgctggcacagtatcatacacatagaaggagtccaataaatgttgactaaatgctgttgttgaatcttgggctcccaggagaagatgggataaaagttgctaatttcagccaaacactcatttcctctgcacatcataaagataaaacaggatcacagttgttagagtggaaaattccctcactgttatggcagcagatagctagtatgtattccaatgaaagactcaggaatgggtataaaaataatccactgtataccatcaaaaattgaaagcacattcttttcctttgaaataagatcggcttctagaagctttcactccaacacccatccatctaaaactcctctccaagggcacgagtaaaatgcaacttgtttcataataagtcccaggagtttactttaaagacatgattacccagaaggcaatgagagctgtctacaatttcttttgttttaagaatatttctatcctaaagaaagacagggcagcaccaaagtttcactggaaattttggcttgtgaattatacaggaaatagaaattttgcatatctgtgattgatcgtggattggacctcattcccccaattagagttgctcaactatggagcataaggctccatcaaaagcccaactatctgtcacatcagcattaggccaagctgtaagctgacagcctttattctacagtggtttcattgctgggatcaatgactgtttcaaaaccaagctggggcattgcatactcgagccattattatagctactattagcagtgtccttaccaggtactttgcacgtcttatctgacccaggcctcccatcagcaccatgagggggatgcttttagcatctccatcttacagatgaagacactgaggcttagccagatgaaggggcttctccagctgagtggtgccggcagtacttgctttgcagcctaggttccttatcatgtttccattcacctggatggagttgagtcaaactgcctctggccgcctccagcttcctgctgggctttgctattaggggcaccaaagaagatcagagggtcggagagaaagggtttgcaaatttgcaaatatgcaaaatttctatattttgtataaatcacaggctgaaatttacagtgaaacttcagagctatcctgtctttctttaggttagaaatattcttgaaacagaagaaactgtagacagctctcattgcctctgggtaatcatgtctttaatgtaaactcctggggcttattatgaaacaaattgcattttatctgtgaccttggagacaaattttagatggatgggtgttggagtaaaattgagtctgggctgcctgtctaccttggtaccaacttctactcttgtacttttctcattgtgttgcattggctcatactcaaaggttaaaaagaaaaattggcacaagccacatttggtccacaaactccttgccctccaaggttcttaaagggcatgaaattttgctggatcacgcttcagagttgctcataacatttctgattttattgaattcccccctcctccctttttaggtccttaggtaaaactccactaaaacaaacaaacaaacaaacaaaaaaacaatgacccattgccagcaatcctctggctgcacctttttctgttgtctttagattcatggagtagacattcaactaagcagaaatcctcctccaacccttacttcttccctctcaccaaacattcccatgcctgactcttctttaccttagaaatgtcctcgttatccccattagtatcagctggttccattaggacacagatatcccgacctggacattctagagatttatttcctcaccaggcactggtttggtaaagttctccttattccacaacatgagcactgttagcattttggacctgacaattctccatggtgggggccatcctgggcattgtaagttgttgaacagcatccctggtctctacacatgagatgccagtagcgtctccagttgtgacaaacaaaactgtcttcagatattgtcaaatatcccctgaggccaaaataacccctagttgagaactactggtttagtgaatgacaagtggggcctggcagcaatacaggtagctccacacattcctacacatcaaggctccttggaacatgctcagtggtgactgtgagtctccctcaggaacaggggagttagaagcccccaaagtgaggatcccagtgctttttttttctgaagccctttcatattttatgcctatagaagcttagggtcttaatacattcatttctgcatgggtggggtttcagtctgcaacaagatcttgtagggatgctatcgctggctattaggtgatcacagttctgtgcattgtctcacccagtcctcacagtaactccaaagacaggttgtattatgatcctattctatagatgaaggaacttaggaaagtcacacatccaggccatacaggtagagagtgatgaagccaagacttgaggcgaggtctttttgattccaggtatggattggctgattataactgcttcttttgtgataagagagggtactgggactcctctacttgagaaagaaatgcagtaagtgaaagaaatggtggaaactcagatgctggacaacacatccaggaggctggctcctctccatcaataaaccaagaacagttgcttagtgctgtcacttcagaaaactgactgagagaggccagataatgatccttccttctccatatctatctgccagtctaacttctcagttccatgttctacttaaggggcaggaaggctttattcagttgtgctattgctattcaacgagtgttgccacctagtttagctacaatcacaacatgatttcatttgataagctatgtgagggcagaacaatgtctgtattgtttgccattttattctcagcacttggggctctcaatgagcatttctgaaatgaatgaatcaatgaattaatggataaatctatcttgagaaagagtaggtaaatttttacttttattgcttttcttagatttttaatccatgagcaggaattagtgatgggtttcaagatgatcaaacttaatgtggtatgtacattattgatgtggaatcttaaaaatctctactgtccattatatgtactgaaacatcactatgtaccctataaatatgtacaattattatgtgtcaattaaactaaaaggaaagaaaatatatacaaacgggtaaatctgtgtttccaatacacatcttttgaatgacagcagagcataatacggtatttcataaaagcaagacaaaacacaacaaaatgatttgggggtacattgactcatgattaaataacagtgacactcctagtaggaaagatttgcccattggattttctttaagtccttctgtctggttggggagaaagtctcagctggtgctaacgtagtctttaacaccacactatcacttgttaatctccctttttgacaaaggaagaggagacttcaggctcagacccttcaacaggcaacaagtccagatagaattttatagcattttaatgtttatattgtgacatattcaagttggtcatctatgtaaggcaaatgacacttgtgctttacatttatggtttttgtaaaatatttcccttttaaataaatctaggaaaccaaaaaggaagggaaagctattgaaagtaaagcatttcatgtctttataacagttattgcatagatatggcaaacatttttgatgcagtacacaaatggatggaatttaagaaatactgtcacacctgctaagaacgaagatggaactggtttttaatcctaaatttacaccttgctagaaaggtggacttcaggaaattcttttgcttttccaggccttgattgtcctcagatggaaatggggatggtatgtacatcatagttttttaaataatattttaatgagatagaatactttattacctggcatttaggaagaactcaaaaaaaggttgccatttgttgtttagatcttgtttacccataagctgatgccattaaagacggacaataataccagggaatgaaaaatatgccttcttttattttcagatggtctggcttgatgatatccaacctgacgtggcctgaagagacagacagtggctcttgctagctaattattgtcagatggatcggcagccgaccaacgcttctgaaactattgtttttggcaaatgttcctcaacattttcctggtatataaataatgatcccttgcagaaagtcacttcctttagtttccttggtgtacgtttcacaaatggtttgttttggcaggttctccaggaagtcactttatcatagctacaggtggtttatgaagaattcattttggttaaggaggacacctgattaggcctgccttaaacattttcaggccatagctatttgggaaatgttacattctcttgggtcttgaccgtctattctgtgtcttggggcagattcagaacaagattctgtgtaaaatctggaaattttggctttggctttggaactgggttatctgactcccatccaagcttttttgttgttgttgttgttgctgtctccctctctgatcatctaatactccaagaacaaagtccagtaaccagtgtttttgagatggaaccaaatggtgaaagaaagagagagggaattttaaagggctgttgatcaggaaagacatatcagagagtgaggtagcttggagaaagggaagggagtggtgcttgggggagggtacctggatcctgggggcccactcaccacctttataggggcagtagataggagggtaatgtcagaggattgcttagtggtcgagtacatcttcttaggggcaactaattccctctactcccagcagggttctaccaacagaccgtattcattagcacagaggttgactgctgtcatagggacccaggatgagtttggcttaaccaaaagagaagccctttctctctctaagcctagggctgctatagtatggcagtaccatagtatcagtcatccagcaccttcttacttgttgcttctccattttttgacaacttccttgtttgtctgactcagaatggtttactaccatccccacatttcagctagggggaagaagtaagtgcagacgagtgggcaaggtgcttgagaagccatgacccagagtttgcacatatcacctcacttaacaacccttacaaatatttaccaagcacttcagactcaagcactgtgaataaagcatattagatttctaccttcagtttaaaaggccaattagcattcttcaggggctacagtctcatttccttgcccataaatagttatcaaattttcagaaaaacatattcattgtttcctatattcattgttgtgcatgaagaacattgttgagttctgcctgagtgctggggtaacagcaaagacagtaggcagatcctccctgcagggaacatacagtctgctgaaaaatagtaatgaacaaatatgtgagcaaactgaaaaagcagttgcaggtggggcatggttgctcacatctgtaatctccacactttgggaggctgagctgggaggatcacttgagctcaggagttccaggccagcctgggcaagatagtgagaccctgtctctaaaattaaaaaaaaaaaaaaattcaaacaattagctgggcatggtggcacatgcctgtggtcccagctacatgggaggttggggaaggaagatcacttgagcccggaaggttgaggctacagtgagccttgttcacgccactgcactccagcctgggcaacaaagtgagaccctgtctcaaaacaaaaacaaaaacaaagaacaagtaattgcaaattgtggcaagcgttttggaaaaaaaaccaaactgaatgcttaaagagaaaagaatgagaaagcatcttgtttgaattgatggcttccaaagctttttgagacagtgtcattagaaagcttatccttgagaagaagggagctgagaaggagggagccaggtgaaattctgggatgttggaatattatacagcagtgaagatgaaagagccacagctatatgcaaccatgtggctacatctcagaagcatacagttgagtgaaaaaaaaaatcacctaagactacatacactatgataccatttttatcaacctcaaacaaacaaaaccaagtagcatattatttcaggatgcatacatatggaataaaactaaatacaaaaaaagacatgagaatgataaacacaaaattcagaataacgtatacctgagtgggagagaaggagaaaataacaggatattcaagataaagtgacagttttaaagttagatggtaggttcctggatgctagttttgttagtgtgctttccaacttacacatgtgttaaatgtatttttgaatgtgtctaacattgcttaatacaacacattttaaaaacatagaggaggggcattcaactcaagtatctagggagtccaggcaggcagtgtaaactggtgaagtggctgagtgggtccctggggaacaccagagcacctgcctcatctacaggggtgccaccgcccagtccctgcctggggttgccgtgtgagcttgcaggccaattacccaataacatccatccagaacttccgatttttcttaaggagcctcacatctgacatctgcatttttacaaagcactattccaatgctggcaacgattccaaatttcaaaaactctgtgggggcaaacaataccctttgggaggcataccaagtctcagaaatagaggaagtacttggaggccaacattaattccgtgcctatttgcaacaagaatgcctaaatgtatttctatcatactgcgctgctcgaatgcaggcaggaaggaaacccatcccctctgcgttcccagagtgtgctatttccaacctgtggctctgctgggttcctgcgcctctctcacttgtgagctctcacctctaagtttggaacgtgtgaaggtggtgccagtgcagctgagagcaggcgggcaggagctcaggctgcgtctccatccgaaagcctgctttctgcatagcaccctcgcccccggccttccaggcccggctgtgcatggtatttgcaacactctcattttcccctaaagggccgtgggggaggaatgggcaacctgcagctaggaccatgctgctgagatctaatttacgttgtccactgttgggaccgaacactttccatgcaagagtatgcagaccccaagggacatttggcaatatgtggagatatttttattgtcacaactggaatgggggcactgcccagatttgtgggtggtggattgtgggtggaggtcagggatgctgccaaccatcctgcaatgcacaagacagccccccttcctcaccccaacactccaacaaagaattattccactgaagaggtcagtagtgaacagtgctgaggctgagaaactcttttccctctgtctgctcccaccaaaagacaaaggtaaataaagcccactccctgtgagtgatgaaaggtgtgtgttgggggtggggtacggtgaggggtgtaacatgaatttagaagaaatgccctttagctagagctgggatttgtggccactatttttgtttttattaaagcgtaatgctcacaagcagaagaggagatttgttattctaaagacagttgcacaccaaagcatgctattgtataatctggcattttccccactagggagctatggtgcattactcacgagtgacagaaccaacgagcttcatctcccaagaggctggtgcatctgtttaaaggagcaggcactaggcagagcagcccccaccccaccctccatggcagagtgcagtgggggaaggtaagcttcatttcagtcacagtgaggatgaaccatgcattgattctatgcccgccccactcccactccccaaaaggagagggtcgagtccagttgtgttctagtagcgggaccacaggagaggaggcgattattctaggcttcagttcaataaatgtgattagggaagttctagctctttctgcacctcagtttctcagaagacctgtgcatactggggccaagagcttggggtttgggagtcagttgggtgtcatcagtttgaatgcaggttcagcgcttacggtgtgtgcccttgggccttgacttctccctgagtcttggttttctcatctgaaaagtagggataataatgcttgtctcatagggtcacaagagacaaggattataaagcactcagcacttgccaggcatgtagcaaggatcattccagtattcagagataaaaggaagtcaacacatcttccctttgcacctcgcagaacagttgggaattgaaatgaaactatggatgggaaaatacttggaaaacttaaaagtgcaatatcagtgaaatgtaatgaaatcaatgtaaacatcaatgcaaatagcgatagtgtttattgtgctgatccaaataaaatggaaacattattacacactataattatagccagttagaagtggaagaaaattaggtctgcgttagtttaaaccttctgttttataaggggagaaattgactttagtggcaaaactttcatgaaccccagcctggtgccctttttccactccccacaaagttaacttgtttaatttggcagccagttagagcattacggcatcagatggaaggtctgtaacatacagacataaccctcagtttcttcatctctaaaatggacatgataatgaaacccaactcacaaggtagtgatgaagaatgagatcatgcaggtcaaatgtttagcaggcatgcctagcccatggaaagtcctccagaaacagtaattatcattatccttattaatggtagtaattgagatgacatctgtacatgtatctctcccagaatctgacataaactggaggcggggggcagggtggtcaatatatattcatttgtgccattgcagataacagtacctcaatgttctgagaaacattggtggggactctaagtcttcctgaacaattcaccatcacattgtctggttcctggacatcccaggggaggacctggacaagccaatgacatccttttgtagcttcagaaatgataaaagctgtctgatagtctagaattcggacaggggtagaattctacaagccaaaggccctgatactaattttgttctagtctttgtattagtccttttttacactgctgataaagacatacccaagacaaggtaaattataatgaaaaggaagtttaatggacccacagttccacgtggctggggaggcctcgcaatcatggtggaaggcaaaaggcacatcttacatggcagcaggcaagagaatgaaagccaagcaaaaggggtttccccttataaaaccatcagatctcatgagacttattcactaccatgagaacagtatgggggaacctccccaatgattcaattatctcccaccatgtccctcccacaacacgtgggaattatgggagctacaattcaagatgagatttgggtggggacacagccaaaccatatcagccttagaggatttgtgaacatttagggtgggcagcagagatcagtcacatgttccgatggccctagaccagtggttctccaattttggcctgcatcaggatcacctggagaattgttaaaccacaggttaccggccccatgccctctgagggtctggggtgaagtcctatattttgcatttcttttttttgttttttgagactgagtctcgctctgtcgcccaggctggagtctagtggtgtgatcttggctcactgcaacctccgcctcctgggttcaagccattttcctgcctcagcctcccgagtagctgggattacaggtgtccaccaccatgcccagctaatttttgtacttttagtagagacggggttttgccatgttggcaaggctggtcttgaactactgacctcaggtgattcaccctcctcagcctcccaaagcgctgggattacagacgtgagccactgtgcccagcctaaattttgcatttctaacaagaccccagctgatgctgatgctcctggtccagggactgcacttcagaatcacagtcctggagcagcattgctctgctacagtactgctgatgtttagggctggctaattcctcgttgtggagggtactgtagggtgtttagcagcatctctggcctctattcactagatactggtagcagtttcaacaaccaaaaatgtctccagacattgcctaatgccctctgtggggcaaaatctcctggttgagaactgctactgtagaccgagatgattagaatcaaaccctagtcacttcttgtcatagcagtatgacttcagtcatattgctgtacctctctaggcttcttcatccatgtaatgggtacagggatgccaacctcataagatccaagtagagtctaagagataatacagggaaagcactaagcacagtttctgtacacattgagcagcttaattcatgttagttattgcttttgagccctccgtagcagatcaacttagtgcaatgttttttttcctcccatcaagaagttttcatagaaatgctttctataaagcattttcatagagaaagcaggttcatatagaaagcactggctgctggttggagtggagagattgaagaccctcatctaggatcaagcaacccccagaaaacaattttaaacatgtccattcagacaaaaggagtccaaaaccataagatcctctcagcatcctgaactaatgtccagctgttatctcggtgagtagctcccaatccttagctcagaagtgactgactacaaaagcatattccagctttatgagcatacctcctgcttgctagccagggttgatactacagagatgtctttccagtttttagaatttaaaacaatgatctggtcactcacattttctttcccaactttgctctagaagtgagctttcaaatctggagcacttctgcgttctgagttcccaaacaactcctgttcaagggtgatctatatctatgctgccacacacaagggatcatggatttttctttggctgtcagctctcaaaattacccagcaatcccaaaatgaatttccactaatctgacagttttgcctctcctgacatgatgtactgtatattcagtggtcagcagggactatttaattgcagttaagcctgtgctgttcactgtggcattcaaaatagagcaatgtgtaacgtggctacccttactgactctccaggcccagatgggtgggtggaactcaattttggggggaaacttctacttgggaacatttagtaattaagttttactgactagcagctttaattctttcactttgaagatttataaatgttagaatcaaaactaacatcaaatctctctacaaggtagaaggaactaaaatatcagatgaaactgatgatgagttacaaatggattagaaactcaagaaaggagagattaacattttcagagtacgtactatgtgcttgggagtttgcaggtgttatctcacttttctcttaaagcatttcaaagaggcagggacattcccccccccccgttttacagatgcagaaactgaggacttaaagagattaagttactgcccaagacctgtgggttgtgtgagcagagccaagatttgagcccaggtttttctgataacagtctagattcttatgcccccacactaaacttcccaaaagatgctagatgtcattggtttttcaactgtttatttgacgggtggagaaactgaggtgtagacagttcaaagtgactttctcagaattaagttatctcaggctcaggaaattagcctgtgggtattcataagtctgattattaagaataatgcggtgctttgctgcttataaagtgctataacatccattatctcatactaaattttggttttcaagcaattctgttatatgaactgataactcaaaaagaaaagcattttgaaaagtgctctttttcccactgttgaatctaatgataaatatctgcagtataaccacaaaaatgctactgtaaggtgccatgaacacatgaagagcaaagacttaagtggattcacgtattcagcaaatattattaagcttgtaatatgtgctaagcattattccaggtgctgggaatactgcagtgagtaaaatatttaaaaattccctaccctaagagggcttacattttggagggcgcaagcagataactaagtaaatgagcgagatatatagcatgtcaggtcataagtgtgagccagcaaaatcaagatgggaaggagagaagggggcactggaagcagggattaagtggagagggtgatatttgaatgcagacgtacaaatatgaagaacaagcttttttagtatatcgggaagagcattccgggtagaaggaacagctaatgctaagtccttgaggcagtaaatatacactttgttatgtttaagaaaccctaatggttagcgatgtggcaatttttcatggacttatttgccattcatatgtcttctgtggtaaaatatctgttcaagtcttttgccctttttgggtaactgtttttcttcttctccttttcctcctcctcctcctcctcctcctcctccccttcttcttcttcttcttcttcttcgtcttcttctcttctttacttcttctcctcctccccttcttcttctttttcatcttcttctcttctttacttcttctcttcttcttcttctccttcttcttcttctcttcttcttcttctcttcttcttcttcttcttcttcttcttttttcctcttccttcctcttcttcttcctcttcctctcctctccttctccttccctttccccttctccttccccttccccttctcctttttcttctccttctccttctccttctcctcctccttctccctctccttctccttattgagacagggttttactcccattgtccaggctgtagtgcaacggtgcgatcttggctcactgcaatctctgcctcccaggctcaagagattctcctgcctcagcctcccaagtagctgggactacagacacacaccaccatgcctggctaatttttgtaattttttttttgtagggatgggatttcaccatgttgtccaagctggttttgaactcctggggtcaagaaatccacctgcttcggcctcccacagtgctgggattacaggtgtgagcccctgcacccagcctaattaagttttgaatatcttatccctatcaatgacttgtcttttcattcctctaacgttcttaattttgatcaagtccaatttatcttttctctcctttatagattgtgcttttggtgttacatctaagaaatctttgcttttgattattttaaaaattgattttctcatcaagtaaaagaaaatgtactttcaagttcctttaagtatatccacgttgcctaggcaaccaagttatttatcaataggtgatcatttgtaatgatttgttaataaaggaattagaaaatcttgccttccatgatccttaatctacttgcaagacctcaacccctttagtataaacttatccaagacctacggtcaagttggaagagaggcaggtgtgattttgtggggaaagcttcctgggccccagcaataggagactgaattttcttctttgttctgctactaatcagaagctcaactctgggccagttgtactctcttttttgtttacatttccaattgcaaaagtaaggagttgtactagatttttctgtgctcctgtctagtcctaatactatataaatgggacattgacagtaaattgaacatcttcagcaggaccaggactagagtcaggcaagagctgcatctagggtacagcatttaagaagctgtgcgcggccaggcagggtggctcgcacctgcaatccagcactttgggaggccgaggcgggtggatcacgaggtcaagagatcgagaccatcctggccaacatggtgaaaccacgtctctactaaaaatacaaaaattagctgggtgtggtggtgctaatatagtcccagctactcaggaggctgaggcaggagaattgcttgaacccgggaggtggagattgcagtgagccgagatcatgccactgcacactccagcctggtgatagagcaagactccatcaaaaaaaaaaaaaaaaaaaaggaagctgtgtgctctcaggattgtccaaattttcattctgtatttccacaaccctaacaaggagccacttggaagacactgggaatgagggcctccatgaattttatgccctccataattctcttgccatatcctagttctggtcctgaccctcaatgagataagtcggcatgacccatgtgggggctgtgatgaactggcacagggcgtcttgcatttgagtatgcattcgaatcccctgggaatattgttcattctcattcagaggttctggtatggggcttgggattctgcctttctaacaagctcccagatgatgcttgtgctggtgcatgggccacatttttcatgtcaaggaactagaatgtagcagctttgtccaaaaaagcaactcaccttcatacattgccatgtgggaattcagtccccagagtgctcaatgtctttttttgttttttttttttttgtttttgtttttgggacatagtcttgctctgtcacccaggcttgatagtggcttactgcaacatttgcgtcccaggctcaagcaattcttgtgcctcagcctcctgagtagctgggaatacaggtacacgccaccacgcccagctaagttttgtatttttagtagacatggggtttcaccaagttggccaggctggtcttgaactcctgacttcaagcaatctgcccacctcaacttccgaagtgctggcattacaggtgtgagccaccatgccttgccccaaagtcttgattagtcagaagagacactagaaatctgtggtgtaatatgaggtctctgaaaatgggcaaagaaatagcaagatctcagaatcaatttaacaacaaagtcaacatccctgtccccacaccagaaatgttagcctaaaaaaggatgacagagttagactcaatttcatttctcagggtgtccttgcttgagttgacatgcagtgatggatcagtggctcccctattctcttccatcctttttgcccactgtgtctctactagtaattttcatctttgttttttagcatatctccccctctctctttccactccccagctccttacatgcctcaaagcttctctggaatagacagctgtctcctttgtcagcccaacatccatttgttctccttctggcatcagcctgttttgttttgaagatttattctctccccacattcagctcatgggattcaaaccagactgcaccttcctgtacccatggctccagtaggaaccaggcccaagttggccgatcagggtattctatcaccccagctccagtgattggctgaggaatgagcacattacccaggcaggatggattacctttcttgcccagcctgagttattggaaaaagcgagccctttcccttggaattggaaaactggcaataatgatatctaacacttactgagtgtttactctctaccaggcactgctttaagaacatgcttttacatgaattatctctttaatccttacaacaatcctgttttgtatgtacttttattgtcatcatttcacagatggggaaactgaggcacagagaggttagagatatgcctgaagccacacagcttgcaagtggtggatctgggatttgaacttgtcgatctggctgcagagctgagctcttggagactaggttttactgcctagtagcatgtaagcctggaactgccggcagtcattttgtaagtttgccgagtgaacctcaatgagcatgaagcagagaggaaagcagtactaagagatgcaaaagagtctgtgttccagcaatgggatctgaagtcctggatcaaaccttacctggagacaagatttacccatcagacatgccagttataagacccaaatttaccctttttgggggattgagtttgaatgagtatttttgtttgtttgttttggcatcagaaagactcctgattaatacacagtgtgacgctgaccaagatgcttcctttctctaggactcaattttcttatctgtaaagtaaagggttcatcaacattctttggttgaatcttacctgaaacattttgtgagccttcaccaatctcatctaagcctttgtttccatagaacaaagccctttaagaaaggaggggaaagtgtcatggagtcttactgtcctgagtgcaaatatggtctctgtattgtccttatctgttcattttctgcctctcagtactagaatgaaaactctggaagaagaaggaattttgtctgattttcttactgctgtatcctcagtattttgaactgtttctaactcagagtacaatctcaaaattttttttgattttcatatatctgtatatatatttgttaaatgagtgaagaaatccttatatgtctttatggataacaagctggcttgggcatggttttcagttatgggtccttccttttgtgcgggagtggttatggatggtatttgttcctctctgcttcataattctctcatccatttttgacttaatggacagaaacaatagatgaataaaatggaatcatctctgaacaaaacacagggttttaatgcttcttaaatcctgtaacatattatctcttctaaactcacagtaagcagttaagttcttatgatggatgaatttcagtttcaaatgatataagagaggactgtgtcttactttccttcctattttacttatatttcaatatcttagtagagctattatgcgaaattgatcccccagcattaggaaacaggatgttgctgacactgttatatgctattatataatgtactattatttgtcatttttgtcatgacatccagcccaagcttctctcttgcaaataaacctcatttttgttttgggtggcaatgtgctcagatccaggtaataataaagactatagtaggctgggtgcggtggctcacgcctgtaatcccagcactttgggaggccgaggtgggtggatcacctgaggtcaggagtttgagaccagtctgaccaacatggagaaaccctgtctctactaaaaatacaaaattagctgagcgtggtggtgcatacctgtaatcccagctactcaggaggctaaggcaggagaattgcttgaacctgggaggcagaggttgtggtgagccaagatcactctttggcactccagcctgggcaacaagatcaaaactccatctcaaaaaaaaaaaaatatgatgataataaaataaaataaaatgaccatagtagctatcacttgagtattttttcctatgttttaggcactcttctaagccagaaacatgcattttatgtatttgacatatgaaggcatggattgggattaggatcagccagtcatgctgtcaccaaccctgaattccaggcagctaagtgtggccatgatgttcccctgcccagtaagaggctatgcagcaggtggactggagaagaagtgggctttgcttccagctttgcaaccttggagaatttatttagtgtctcaatagctaaggttttgttttgttttgttttgttttttccttttcttaaatctctgaaatggggttaataatacttacctcacagagttgttgcaaaggttagatgagctaacgcatgtgacacacttagaaaaatgcttgaccagtgcttctcaactgagacaagtctgcctcccaggagacatttggcaatgtctggagacacttgtggttgtcacagctagggtgggagtggagcaggtgcttctggcacctagtgagtggaggccagggatggtgctaagcattctacaatgtacaggacagaccctacaaccaagaacaatctggtcccgagtgtcaataatacaaagtgggaaatcctggcctagaccttaataaacactcagagtatgggagctgcttgagggctgcctagaacataacctccagaagagcagagagatgttgcttttttccctgccctatccctggagcttagattagtgcttggcacatagtagtttctcaataagtatgtgttaaatgaatgaatgatagatacaatgacccttggaaaatttttgctgtcatgactattccatcctcctctggtttcatcctactttggtctcagtcattataagttgttacaggagccatttaccatcatggtacccaacatgctgatggaagaggcaaaggctagaaggaatctgggcctctgatgaccttgtcagccactgcactggcctggactaccggatgccaaggttttcagcctataaaaaaatggccactattacacaggtttctgtgacatgcagacaaaaacattcataactaataaccagaaaggacagcatcttctcttgggtttatgacatgaatttactgtctcaaacccactgaagaaaacaaccccattggttagttcatttccaaaggctctgcttatcatcagataagctgaaattaaattttttgtatttggcaactgtgctccaatatttaaatgccaacactaaatgttctaacaaaagtggaaatattgtgccactttttggaagtgcttggcagctaacaaacttatcctggcataaactctaggaagttgtcttaattttcaaaattactcatatgaagaagacatacatgtggccaacaagcatatgaaaaaaagctcaatatcagtgatcattggagaaatgcaagtcaaaaccacaatgacagtcagagtggctatgattaaaaagtcaaaaaatatcagatgctggcaagactgtggagaaaagggaatgcttatgcactgttggtgggagtgcaaattagttcaactactgtggaaagcagtgtggctattccttaaagagctaaaaacagaactaccattgggctgagccatctcattactggatatatacccaaaggaatataaatcctcctactataaagacacatgcacacatatgttcattatagttctattcacaatagcaaagacatggaatcaacctaaatgcccatcagtgatagactggataaagaaaatgtggtacacacacaccgtggaatacgatacagccataaaaagaatgcaatcacatcctttgcaggaacatggatggagctggaggccattatccttagcaaactaatgcagaaacagaaaaccaaatattgcatatcctcatttgtaagtgggagttaaatgatgagaatgcacggacacaaagaggggaacaactcacactggggcttacttgaggatggaggatgggaggagagagaagagcagaaaaagtaacgattgggtactaggtttagtacctggatgacaaaagaatcttcacaacaaaccaccatgacacaaatttacctatataacaaacctgcacgtgtacccatgaacctaaaataaaagttttaaaaagttacccatgtatttaatgcatgtttgttgaaggcttaagataagtccaagatgggacagggagtagggtataacaagaagaaaacggagctaagttcggttctctgtccttgtaaaactgacaggctgaaaggaaatgtggatatgaaattaccagtgcagtgagtgtcatgaagaagcacaaaggtctaaacaacacttactgggagtctctaagctactcaagagatcaggaagggactttcctgagaagctgagatctgcattacgatgtcaagaggcagtatgagacagtggctattaaggttctggggtaagattatgaagtttttgtttgtttgagacaggccctctgtcacccaggtgggagtgcggtggtgggatcatatctcactgcagcctcaaacacctgggctcaagccaccctcctgcctcagcctcttgagtagctgtgaccactggcatgcaccaccacacctggctaatttttttttaatttttaaaattttatgtggagatgggggtctcactatgttgcccaggctagtcttgaactcctgacctcaagcagtcctcctgcctcagtctccgaaagtgctacgattataggtgagataatgagcttttgagttcccctattacctattcctagatggatgatcttgaataattaattgccaaaaggcttgataccttatttattaaaataatacttcatagggttagtgtgaaaattaaattggataatagtgtaaacttgctgtaagcctcaaatattataagccttcaagaagtgttagatttgtaattattaaaaattcacagccgggtacagtggctcacgcctgtaatcccagcactttgggaggctaaggcaggcagatcatgaggtcaagagatcgagaccatcctggccaacatgatgaaaccccatctctactaaaaatacaaaaaattagctaagtgctgtggcacgcatgtgtaggcccagctactagggaggctgaggcaggagaatcgcttgaaccagggaggcagaggttgcagtgagccgagattgtgccactgcactctagcctggcaacagagcgagatgctgtctcaaaaaaaaaaaaaaaaaaaaaaaaatcactaaggggaggaaggataaaaagcaggggcatgcacaaacctgttttatgatttctcaaaacttgtttctaattcatcccttgcaggttacatcatctggagactgagaacttgggatgctccttgttcatccaagcatttgaacaaatccagtgtcctttttgagcaaaatatgagccccacctttagaatctgtgaatctccccttcagatgggaaagctgtttttgtggctaaaattagaaataacccaaatgtctatgaaatgatgcatggatagataaaatgtgatatacccacacaatggaaaagtatttatcaataaaaaggactgaagtcctgatacatactccaacatgaataaatatccaaaacatcatgctaagtgaaaggagccagacacaaaagaccacgttctgtataattccatttatataaaatggcaaaaaaccaaattcataaaaacagaaaatagattagtgcctagatttgagggtgaaaaaattaactgcatgatctttttggagtgatgaaatattctataatggattattgtgatagttgcacaacttcttaaatttactaaatatcattgaaatgaataaatttttatgttgcgtacattatatcctaataaatttattttaaaaaacatcctttatgactgagttaaataaacttgcaagctcctaaatttgtatggtaggatgttaatttttagtttaagacatttggtttctaaagatactgaatctccagagaagtcaaatggaatattagcagttgggctaatctgagatataaccttgatgaatttgctagggatgtctgatggttgggagggacattgaacgttttgagccaacaagatctctgacttccatccttatagtgaactctgttactttgggcagcattatctcatctacctgttgaaatcccctttctaagttattatcatcaagattgttcaaatagaaaccaatattgctgtattttgtcttttgtacagccatatttgaagacattggctgttaggtttcttgagatccctaaaatgggatcccttagatctcattccatgaaaattattctcatcgcatgcagaaaataattttatgatttggaaaaacttgtttctaattcatcccttgcaggttacatgatctggagactgagaacttgggacactccttgttcatccaagcgtttgaacaaatccagtgtccttcttgagcaaaatatgagccccacctttagaatttgtgaatctccctttcagatggaaaagcttttttgtgcattaaataaacttgatccttagatccatatgatcttcaggcgaaaatctcttcgtggccatgaaagttttacttttggtgtatttgtacattttctcctatgatacagggagagacgtagttcaataggttttcctttttgtctcgacaactaggaaaggcaaagttacattcaatggtcagtgttgctgtagctctgatgtataataatgtcttatttgctgttctttctctctctgtcatgattctatatataattgtctcatttgtattatgcttaatttagtgaactacctcacattttaggcagtgagtgggttgcaaataaaaataatgaatgcagctgagtgcggtggctaacacctgtaattccagcactttgggaggccgaggtgggtggatcacgaggtcagatcgagatcatcctggctaacacggtgaaaccccgtctctactaaaaaatacaaaaaaattagctgggcgtggtggcgggcagctgtagtcccagctactcaggaggctgaagcaggagaatggcgtgaacccgggaggcagaggttgcagtgagccgagatcgtgccattgcactccagcctgggtgacagagcgagactctgtctcaaaaaaaaaaaaacaaaaaacacacacacacacacaagaatgcataattttgtacatttgcaattatatttttctgctttcgaaattaaccaacatgggcaacaccattggtggtggttgtcatatacacacatacatatgcaagcgtgtatgtgttttgatatattagatatgcagatataggtgtcaacatgaattctcagctgaaaaataggagtagctagtgaaaatttgtggctagatttaaatctctagaaactgttctttagaaaggacacattaatgcaaagtaaattttactaggaagaactaataattctcctgttataaaccatacaacattattagggagttaagtttagattactttaaaatacttgtggttggggttctatgatttagacacaattgtttctttcaaaattatttctcatgacctcactataacttcaaggatatctaatgcctaaggaatcagatcaaagatgccacttgaaatttcaaaataggatactaagatattccactgtagccttctggcagcagttacatgagttccctttctatctttgaaaactggtcttgccatctcataaagaagagtgtgaaattgaacttgcaattaaaaaataagcttcgtttttcccctcctctccacaaacctctcgacacaaccaaattgagggtcatcaggaaacagaaggaagagaatgctgtaagatttcaaagatgcctggtaggaatatttcttaattgagccgtgctttcgagctgcgtggaattgttcttattaaaaattaagaacagcagagaagaacatgggaagctcttcgagattagagcttcgtgagatttacttaaaaggctttcattaggcactggggtttctgaagcgtattaaaaccctacctatacaaaatatatggtgctctagcttttagccccttttcctaagaaatataaaacatgggcgcttaaaacaggaataggaaaagaatattttcacagcgttctttgaaataaggtctacgtgttccgatgaggaaataattagcccttttgttcttctctctttcccttccttcgtttttcgctgcctttgtcaacgcaggttagcacaggtcctagctggggtttggttctttattttgttattattatattttaaaaatcaattttctatcttgggtgaatggaggaaaggttttcagcagggcttctcaaactttaatgcgcacatgaatcacctgggatcctgttaaaatgcagattctgatttagtgggtctggggatggggcctggggttccgcatttctaacaagcttccaggtggatgtcaatgctgctgatctgtggactgttctagaatagcaaagagatccagtagcccctaaattaaatcgtatgtatccaattcctttaaagaaggtagggatggactgactgggggaagagtggggatagaaaaaaaggagaagaataaataaaaacaaaaaccaccatacacacaaatataaacagcctaattatctacattgcttcagtttgatgatttatcattcccgagtaattgatgccgataatacaaattttgtcatatttttgtaatacaacttggcttttggtaaagcaattggagttcaaatacatgatcctttaaagtgctgaatatggaacacgcatgtgcacgtacacccacacacccacacacacaaacacacacacacacacacacaatgttgccagtcagagctgcctgctcttctgtatatgtgaggcctcataattttccccgaaggatacaaataaccatgtcgttaaacataagagttttgccataggcagggcaggggatagaggactgatattcaacagaaatttcaacactgtggcctcgtacctcacttggggagctggggttcaggaagaattccttcaacaataagatcaagtgaaaagattcattggaaagtattggaagtattttgcaaactatggagtgttggataagtgctacttgctattattttttcctgtttgcatttgatttgctgtattttgtttcatttaaaaatatctttttgagttgttgctggttcatgcaattcatgctggttttattgtaatttgccaatatgcatcaaaactaaaaattaaaagtgttcgtatactccaatctagcaaatccatggactgaaatgaattctacctaaacccttatgtaaatgtggagagagatatgtatgaggaaggtcattgcattattgcttggatggaaaaaaatctgaaaacgcctaaatgtccttcaatgggactggctctgtgtgtaatggcacacccatagagtgaaatattctgttgctacaacctccaaatgaggtgcaactgaagtatgagcgtagaaagatatcctgaatataaatgtagttatgtttaaaaagaaaaaaggaaaaagaaaacacaaagaagatgtcctgaaattgggttgtccacttgtctgtcaagctttattttgctagcctggtaaaactcctgacaaaaataacactaaaagggtaacagcagtgatcactaggaaaggaattagaaggaggtacattctgtttctattttcatacttttccttgctgtatttctggaaaacggaacataaatagaaaagaggacagaatggacgagtaactagaggacttagatttgggtcccagtttggcttggccgaataatagctttgggcaagttacttcacacctctgagcatttatgtcctcaaatgtacaatgtggattgggacaataccaccccatggttttatttctttggaagactgaatgaaatgcattaagcactttgtcctccacagagaaccgagaatgtccttgtttctttttgctgctctaaacatcactatgtgatttgaggaccctggcaatcagtgctgatacatatctggctcgatgcacccaaatccatgaagctttatacagccttcccccaccccacctctcctcaccctttgaccccttcacagacacttttcccatctctatgggtgtcccctaacaaaatgtcagaaagacccatgtcgttgacttacgcttttgtattaccgtgaaccaatgtacttttttccccaaggctatttgctcttatatcttattctgcaacatctgccaaagaattctgtgatgaaagaaatctcagccccaaagcaacaagccaggaggaattcaggtaggcaagagtcttcttggggtacctgaaaggacataaaatagtgtttgccacttgagtcacttccagtaaatattgctggtccatgaaccacctatattattttttgactaattatttttcacagactctattttaaacaacttaagaatccatgttaaaagaaaatagtaattagtaatgaaaaatccacatataaggtctgcattgatacaaataaataaataataaaaatttgaaagtatacatctgtataccacctaaaatagtgttgtctcctagagggatacatttaccaccctttggacaacaggtgtataaaatatctccagctcatcccaatgattcttattcttctttgcattctcccagtggacaagagacgcaaacgcatgaagcacttcgtgggctcttgcaacaaagcaatcccgttgctccagagtgaaacagtctcttcccaggagggtagacaatgtgcctcattccctgctgtgtatttttagtgcctggatgaatgaatgaaaaactgaatgaggccgggtgcagtggctcacacctgttatcccagcactttgggaggccgaggtgggcggatcacctgaagtcaggaattcgagaccagcctggccaacatggtgaaacctcatctatactaaaaatacaaaagttagccaggcatggtggtgcccacctgtaatcccagctactctggaggctgaggtaggagaatctcttgaacctgggaggtggaggttattgtcagccgaggttgcgctactgcactccagcctgggtgacagagcaagactccgtctcaaaaaattaaaaaaaaaaaaagaaaagaaaaaatgaatgaataaatgcagtgtttcttattcaatgctgttgactttaaaaaacagatttcttattagtttctgttgaaaacgaaacaatcttctgttttcatatgtcaaactcctttgtccatttgggaaaatcacttaaaaaaaaagagataaatccaactcctccattatcacaaggtttgaatttgtacaaaggatgagagaattgaggctacagctcagactattagtggaatttgtaaagggagaaaattaactgttcatcatatatatatatatatctacatatatatatatctctacatatatatatatatatatatatttgcagtaatgtcagtactagaagccttttgttcttatttaattgttgtagagtctgcctgacgaaagtgctgtgaagaagttgtcagttctataaaatcaaaggacttggatcctggcattctaagagctgtctaatttaagaccaccgaaattcacataatgttgttaattcctatcatgcctccacagtggattttttaccatatctaagtagatcacaggctaagaccagggagaaatgaaaaaaaaatgcatatatgtgtatatgtatatctgtatacacacagagacacatagtagcatgtatcatttcagcatgttctagtttgcaacaaatatgcagaatactagactgtgagctaccaagtcttccaaattctgagtattataatccttttcttggtataactgacataattattgttttcaatgaaatcagagattttctttaggcaatcttttttcaagaaagagatagatatgtgcaagcttacagcacacacacacacctatcatataattatattctttctgagtctttatactctgctgtgatttcctttatgtcttattgggggtttcatccagcaattgaatgactggagggaaaaaaaatagaaattttttgtctgtcataaacatcagtgagtttggattacaattaccttatgtacaagtaggtgttttttcatactttaaattttgcattttttagatctctaccatctcttcatgtctatttgtcatagatattcagtttgcagtgtctatgaattgttttgttttggaaaatgagatgtttggagaagaggtctatgtacgtgtgtgtgtgtgtgtgtgtgtgtgtgtgtgtgtgtgtgtattttccctgctccaagcatttcattcacctgattttgataagacagcctcaaaatttcggttaatgaatcatagctcccaccaccctctcagctaaggtaatttggttttaatgggccccaaatagggttgccacataaaatatagaatgcccagttaaatttgaatatcagataaacaatactttttttttttttgacagagtctcgctctgtcacccaggctggagtgcagtggcatgatctaggctcactggaactccacctccctggttcaagcaattcccctgcctcagtctcctgagtagctgggattacaggtgcgcactaccacgcctggataattttttttgtatttttaatagagacggggtacttttatagtacaactatatcccaaatattgcatgggacatattacatcagaaataattcagctgggtgtggtggctcatgcttgtaatctcagcactttgagaggctgaagcaggaggattacttgagctcagaaatttgagaccaacctgggcaacatagtgaaaccctgtctctacagaaaaaaaaatagctgggcatcttggtttgcacctgtgggcccagctacggggctgagaggctgaggtgggaggaacacttgagcccaggaggtcaaagctgcagtgagtggtgatcacaccactgcactccagcctatgcaacagaaagagaccctatctcaaaaaaacaaaaaccccacaattcatcatttatctgaaattcacatataagtgggcatcttgtagttttattcgctgacttgggtaacctgaacccagccttcagcaccaaggcctagactctcactggcccgttagatcagcagttccacggccattgagagccaagacgagaagttttattggctgcctgagggagaaacaggattttcttcctctggatctgaggctgaggatctcatgatttggggttggtgttgcagccacgttgtgccgtggtagatcagcatggaaggatggcacacaatgataatggtcgataatgataataacaatagttactgagcactttctatgtcctgctccgagtaaagaattttagctcattattctgtctataatcttatgcttgactctaaaggtgaaggtcagggtgaaatttgctaggttgaaccacagcaattttctggctccatttagcagttttctctcatgaccaggtgagatggcttagtgatcacacccagggactctggcttcttcgcttttgctcagtcacaatccttagcatgaagttcttgtctttaaggccacaaggtagctgctgctcttaccatgtcagaacaagggggaaaagctaggcagccttctccgggaagcctgtgtcttctactcaggaagccattcccaatatattgggacattaccttttcataatttctacaattattgcctcactttaccaatgaagcacctggagcacagagatagcaagtaacttgttccaaggttaacaattagtgtgttagtagggttttctggggcaacagaaccaatagagtgcaatatatggagagagagagagagaatctatatatatcatctatatccatatccgtgtgtgtgtgcacgcgcgtgtgtgtgtgtgtttgtgtgtgtgcgcatatatggagagataaagttctagaaaaacagaagaaatataatgataatgtgtaggggagggagacaggaagagatgcattttaaggaattgggccatgtaattgtgggactggcaagtccaaactttgcagggcaggctgaccagctggagtcccagggaagaattttgatgttgccactggagtctgaggggtatctgaagggtccctgggggcacagagtaggtaacttcttccaaggttatgcaattagcatattagtaagggttttccagagaaacagaaccaatataatgttctatctatctatctatctatctatctatctatctatccatccatccacctatctatctatctacacacacacatatatagagaaaagagaatctatctatctgagagtatatctatatccatatatgtgtgtatatacatatatctctatatatgtctatcatctatctacctatatatctatatatttatatataatagagaaagagaaagaaagttccagagaaacagaaccaatataatgtgtagtggagggagagagggagagagatttattttagggaattgggccatgcaattgtggggctggcaagtccaaactttgcagggcaggctggccggctggagttcccagggaagaactgatgttgcgactggagtctgaagggcgtctgggggcagatttccctgttcctcagagaacctcagtcttatttctcttaaggccttcaacagattggatgaggcccatgtacattatagaagttcatctgctttactcaaagcccactgattcaaatgtttatctgttctagaaaatgccttcatagtgacatttagattgattgaccaaatatctggataacttggcccagtcaagtcaacacctaaatgtgccatgcagctggtaatttagagaagctgggaatcaaatccttctggtgtctccacagcccaggctctctcatttgccgccatttatataactcacacagcttctgtgaagaaaaagcattacatgtagggaaggcaatttttatccttcataagaacactgaatagcagatctttattctgcccctacacaaatcacttgaatttacctttttattttaaaataaagtacagatactgaaagtcacatgacagaattatatagcttaatggacaatataagctgaatatccaaaacagccacccagctcaaaaaagagagctttgctggcaaagaaacacctttgtgtattccatcccaaccccagttcaattcctttccccaaagtaaccatgatcttgactaggaattggcttgacagctgtttttacaaataaagttttattggcacacagcgacacccagacattccttaacttgtctgtgactgctttcacactgcaatggcagagttgagtggctgtaacagagactgcctggccctcaaaggcttaaaaaatatttactacagaaaaagtttgctgaccccctgttgttgactttcacagtggtaatttccttgagttttaaaatagttttattattcaagtgttcattcctaaacactatagtttagtcttgccttttctttgtatgtcttttaaatctcatttaatctacaggttctccttctagccctttattttccttgcagtttattcgtggaaggcacaggccattgaacctacagtttccactgtctagattttgcggttgcatcctcttggtgcagcttagcaagctcttctgtttgctgttatctcctgcaaattgacaactgaacccagagacttaatcagacttgggttcagtccctctggcaagacttgactgtgtgttcactcagtagtaggcatagaatttctgttcatctttctttctgagatgccacagttgccaagggatgatgcctagatgtgatcatttattatgattttcagaatgttgacattctgattgaatcaattcttttttatatataacttgcaatacttttagaaagaaatacgttgcctcatctttcatttgagttcctcgaagttcatataggaaaaacaggtgaaggcttcattatttttctttatcagtttttgagatactgcattgattctctattgttgttattattatttgcctcatataacataataaagtatgtaaggaatttcagtccatagcatttattagcctaatcaaagctcaagttatcccacttttgctactgagagccttttcaatatggctcctgagtctttctgagatgaccctgaagtctgataggtctttcgctgtttgatatgacaagatgttctaaactcatcttctatatttttctgtcccagatctggaggaagccttcctttccctcttttaagatggtatttcaaatagaatactacgcagccataaagaagaacaagatcatgtcctctgcagcaacatggatggtgctggagggtattatcctaagcagactgacacaggaacagaaaaccaaatactgcatgttctcacttataagagggagctaaatattaagtacatatggacacaaagaaggaaacaatggacactggggcctacttgaaggtggagagtgggaggagggaggggatagaaaaactactcatcaggtgctatgctattactgggtgatgaaaaaatctgtacaccaaacccccacaacatgtaatttacctatataacaaacttgcacatgtacccctgaacctaaaataaaagttacacacacacacacacacacacacacgtatatatatatatatacacacacatatatatgtgtgtgtatatatatatgtatatatattaatatatgaattttgtttggagggacacaaaccttcagattatagcaatgcaaatatttttgctttgcatcttttgtacagtcttatccacccaggacctgtgcctcttgtccccaccctctcacttgaaatttgaggtttataggtgttctcatttttgccctgagttcttgcatgctgattgtgctttgtgccctgtataattggaagtcagttttgctagttataaaatcctcaactcacaatttgttcccttgaataagtatggtactccattttctactggcatacggtgttgctttcagaaagtttgatgccaatatttttaaataaataatattttctttttatctaaatgtccatttaatattccttttgctttaaagtctgatagatttcattagctttaaagtcccgtagattttatttcttggagactgtctttccaggttactattctcaggtacctggtgtgctctttccatatgcagtttcaaatatattttttcaatttcaggaaagtttcttaaattatgtatctcagtatttgttctgttcccttgcattgttttttattttaccatctatttttgaatcttctctgcctgtcttcaatatttccactttctcttgaattttttattttcttgcttctttttaatttttaaattttttatttaaaaaattttcattatgttcaggcattgtatattgtgttaattctctcttgtatttatcacatttttaatcttgtagtttttcctagcttagatttcattttttaaatgatttttttatttctaaatatttcttatgttctttcacctcatttctaagcaatcgaattctgatttgtgttgtgttttcagatcttgtataattttattgtataatgtagtatgctacagttttgatctgtttgtgggcatagctttctggcgtgctttcatctctataagcatgttattggtttttacttctcttttttgtcttgtaatgttgcgagggatctgacctcaatacttttctgttgtcatttctatgtgaaattagttgtcctgaacttttaaaggaaatgtggttcagggcaatttttttttattatactttaagttctagggtgcatgtgcacaacgtgcaggtttgttacatatgtatacatgggccatgtcagtgtgctgcacccattaactcatcatttacattaggtatatctctttttctaatcacatagagcttcctcatctgttttcatatagtattcacaaatggtggcttaatttctaagatttctctggctgttattccaaactcccccgactctatacttttatttactacctttaatttggattctctttccaggagcttcttctcagtatggagcctggtcctggcagggggctttggctgttgtcactgagggctcctgtggcctggacagctcctgcccctttcaggactcacactggcctcttacactcaccagcttttagagtggtcatggcagccccatctttgcctgccacctcagctggtccactgtttcccagtaagttcctattggctatttaaggtttctcctattctcaaatctgggcactccatttctaacctctgcttcctctgggcagagtttgacccgtggggacttggggctctcatccctaccctccggcttgaaatatgaggtttgtagatatgctttgttacctgccttttttttaattcgatgttgtccatgagttttgtttttttctatttagttgctatgtttgtttttaatgtaaggcaagattaaaatattacactgtcaccgttactaccatcctccccaaatccccctgtattagctacctaggcttgctgggtaacaaattgtcacaaatttattagcaaaagaacacacacttgctatatcactgctctgtaagtcagaagtccaggtgggctcgactgggttctgcacttaaggtctcacaagattgaaatcaagacatcagctgagctgggctcttatctagagatgtttacatgcttatctctctgactttaaaatttttatgtaaaattgattaatacacaaaattaatccacataatctccctgtcttaaggttgactaattattagccttagttacatcttcaagaccccttttccatgtaaggtaacattattaacagagtaacatcaggagatgaatgtcatgggggccatgttagaattcttcctaccacatcctcattcatttattttgaatcctaagaatttattgagatcctactatgttctaggtccttgcagtaagggtacaatggtgaataagacaaacacggttctggtgctatgagtagaaaattaatgctgaatgtttaatgaatggatgactaaatagatgtgtaaaggtctaaatgcacattcagaaaaaagcaacagaagactgagactcaatattattgagtatgttttaaaggtccatgtatcatcttgaatggaaatgttgctcaacttctgatgaggagactaattcatcaatatctctgttatcactgactgatgacctcgcataataaaagatcttgacttgcgtgtatgttaacaattaatggaatgggtaatgtatcacatagagtatatggaaggtaataaaaatgtataaatgagaattacacgggttagttggtgttgttaacggttcttttgttctgcgagagcagcagtatcttattcaggagacagggttgcagttctggttgccaaaatgacttaaacatgccaattcaactattagtccttcaaaggtattttccattgcaaaaaccccttggccaagtgtattgacgatgctgtctacttttgacctcctcatttttttgaccctttcaggggctttaacgatgtggagacccattcactttgttagtgtatggttccattcataattatttgcatggtcttgtcatgcttctttatctcccagaaggcttcttatcctgtatccagcccctaatgaaataaaaggatagtgatcaattttacaatacacactactacacatgggacttcatttctttattcagaaatatatgtcataaagattgaatgagaagctaatattcagagctgggaaaagcagtgctctatattagggagaatcagcatttgttagcgtaagcaaaaccctgagtcttgattataagtgtcagtgtgttaaaaaacattgactaaacccagtgtgaaattacaagtctgtaatgcaaatatacttggtgaaatgcaaacacatttagccttgcattaattcattcattcgacagcaatgtattgagtgcctagcatgtgtcaagtgctcttctaagcattgaggatacagtggggaaacatgcagaaaatggcattgccctttgagagcttatattctagtgttgggaattagaaaatacacaaaataaataaagacaccattctatgatcatttattgataggcagtaatgattttaatgttgacaaagaagtttgactgaagtaaattagaaggtgtgtgatagaaataaaaagagatttgcactgtttgcatatatactccttctgtggacatttgtaagaattgtttcatcctggttggatcaaacatttttcatgttctttgaaagatgcaaagccaacagttggttgagtactcagtaaatacatatcaaatgcatacattttactgagtttaatttttatgcaaaataattattattgtagttgaattttataaatatgttttaatgatgtccttgtaattttatcctggatttagtaaataataatattagtattagtaataatcactgctacaatttaacctttaaatattgacttaattgtcacctctttagagagattttcttgactatcctatttttagttatactagttgttacctaatactgcattcctttagtttccttgatatttatcatgatacatgtacttttatttttacatataattgcttatcacctctctttctcactaggttgtaaacttcagaagaaaaggggataaatctgttttatcaatgtgtacccttcatgatgactggcacacaataatccttcaataacatatattaaatgaatgaaatccactcccttcttttcctccttctttgactgtcttccttctatgttcttcttttcattcactagttattttatctcttcttcaagcattcatattacttgcaataataatagccaattatttattgagagtttatgatgtaccagacaccacctaaatagaatcattataatactaaaaaatgaagaattcttactgaatgcctcctctgtctgtattggtcactgtgttgggctcttttcatacattattctttaattctcatagcaaccttgcaaaataagcatctttatccctttcaaaagagaagaagctgtgattctaagagggtagataaagtgccacaaagatggagatgggtaaacattgaactaagatgaagaaaactctctctgcatcacagcctgggtttttcaactcatctttgctgtctcaaaataaatgaatagggtttattagtttcccggattgtgaggattaactgatgtgtttggataaacaagagagttgaagtataaattaatatcactgttgtaaatcatattgcaccttagaaataagaacattatttaatcattggaactcctcactcctcaaatttagagagataaatgacacttctgggcactaactgaatacaacagtagtgactgctcccattgtatgtcattagagaaaacatctttacctccccagctcacctttgttttccttccagcaacaggcacgtttccttctgaagactctctcctttcccggtctcagtccgtgtatcctggataaggattctccctcagctctagggacagagcatacgatccaggcctaagctgaccatggcactgttttcctttagccacaaagatgggctcgagttcagggtgagctgagctggcccaatcataataaatcctggggtctttgtgggtgcaaacagaaaatagactcttaacccctctggattttctcatgggaagataggatctgggggtactacagctattttgtcactacctgggcagagcctaggcttctgaaggtccccagcgcaccctaaaagtgcagccaacacaaagcagagccaagagatgaagagaatgtgattccaactgacattgtttaaactctggatccaggtctgcttggattcttttctttttttttaagccagtttgagttgggctttctatcacttgcatctgcaactattttaattgttatagcaagagtgggatgattagatatgtcagggcaaaactggcctatgctgatgtgacaaataaaccctgaaaatacaatggtgtaacaacaaaaaggtgtattcctcactcatgtcacagctgattgggggttagcgagtctcttgcatggctcaagattgactcaagatttgagcgctttttagtttcgcatctggaacacataccctttgcgggtgctgtggcaaagacaaaacacattagacggtggaatgggggctgtggcaaagacaaaacacattagagggtggaatggtttatttttaagtgccagacattggcccaggttacatcctttcctggataattctccagtcacatggccccaacctagctgcaaaggaggccgggaaatgtggggctcacatgggtgtttggtgagctataacagctccgtcacagccactctctggagaacactgatagtctcggagttttattatctccagtcagaataaaggttgttatatgtggaaactcacaaattcacccagaggtgcttttgagaatctcccctcttctccgatggtcagttgggccaggatgccacccagaggttttctcttcagaggcagaaggcttcagcccccgatcatgactcatgggcaccatcttctaccacagaaagagtttctttcaaggtctcctatatgaggactaatttagcctagcacataattactacttcttacatgaaaagtcatctctagttcccagtattcttccatactaatgggatagaattctttattatatgatttcatgcgctgcttggctacttgtcccttcctttcttcccttctttgactaatatttactgggcacctataatgtgccatgcattgtgctagaccttagagacatagcagtaaataaggaagatgtcattctccccagcagatcaaactgcctgctttcatattttcttccttccttccttgcaaaattttaatttgtaagctatttcaatgtgcactgttgattctaagattagagcatttttttttctcattttttgtcttcctgctgtccggatcggtagagttaacctttatataataggactatgaactacattccaaaccatgtcccaggaaaaatttcaaatccccctctgtatttccaagtcctcttgcctgtaatcaccctcttgatctctttctctctgacttttattttgagaggagtgcatgctgcaaccctgtaattctccttgcccctccctgcatcgtatttggagatatctaacagcaattgactgggtttttattagttcttagggtacgttttccatttttcaaggatctctcatcaggggttctttgccagtaattactacagcaacgaagacttgaaggagcttcctctcagcgttgagtgatggaatttcttaatactactgctttttatttttggaggtgaaaaattaaattaaatgtgcggttttataccaggcttatttagtctgcaaagacattggaataattttgttaaaatgagcatgctttgagatcactctgttgagttgtaagaacacgaaaaggcctctatgtatttatcattttcctaagagtatttgcccagaaagggtcttagacacattgaaaggacagacacacataacaaagaccagtgatgttgaggataagccttttattggggcgttatctcaatcaggggtcagtaaggtgggcctttgggtgctctttttgtaaatacagttttattggaacacagtcatgcttacttcttaacttactgttttggctgcttttgtgctgcaacagcagagctaattgttgcaacagagactatacagctcacatgcctaaaatacatattatctggccctttgcagaaaaagtttgccaacccttaaccttgatgcattttttggtgttcattttgggatttccacacatctaattgttttacatgaaagtgctcttttcagcttcacacatttaccatttattggcaagcttagctgcagagttcacatacaagagaaaatggttgttcacaagtaagagacccattcattctcttttatttatatctcgtcctcaatttaaaaacaaaacaaaacaaaatcaaccatggaagaattaaaacatgattgatttttctttccctacccttttctgatctgtcacaagactaccgattctaacatacaggtcagtgactaccttgggccaacactgaagacatgatttacttaactgacttaaagtgattttccttcaactgaaaaatgctaatgtaattttctttttcttttcttttcttttctttttttttttgagacggaggctcgctgtgtcgcccaggctggagtgcagtggcgcaaactcagctcactgcaagctctgcctcccgggttcacgccattcttctgcctcatcctcccgagtagctgggactacaggcgcccgccaccatgcccagttaattttttttgtattttttagtagaaacggggtttcaccatgttaaccaggatggtcttgatctcctgacctcatgatcggcccccctcggcctcccaaagtgctggattacaggcgtgagacaccatgcctggccgaaaaatgctaatgtaattttcaaggctaaaaccactttatttttcaaatttatgtatttattctttaattgacatataaaatatatgtatttatcatgtagagcataaagttttgaagtatacatacattgtggaatggccaaatctagctaatggcagatgcatttcttcatatagttatcattttgtggtgagaacacttaatatccactctgttagcatttttcaagaaaacaatagatcatcattaactatagtcacaatgctgtacgatagatctcttgaactcattcctcctttagcctctggtatctggcactcagcaatcagtctaacaatcatgctgaaaacttaccacttcatggctatttatgtcaaaaacacggacgctttaagtgaagatcagtttcacaattagataattggtgtagctgacattcgtctactgtttcatttgaaaaatgacttaaagatgagaaaaaatgataattccctctcttttttaaaaaggaggcaaatatcagaagattcccctcacatccaagttatttgtagtatgagctaaagagaattcaggtgctttctgcttatctgcaacaaattatacagtgagagatacattgttcctcattagcaaggataagaaataatgtcacatggagaaaaatgactttctttaaattgtttaaagagttaaaactaatattcagagtgtagaatgatctgccccggccatggtcagtaaataataataacaataatagtgatggctaacatttattgagttcttacttcatgccaggactgtgcttatggtttacatgccttatctattaaagagttcccaaaactccttgaggtggctgatatttatttccattttacagatgagaaaatggagtatctgaaaattaaactcagatccacctgactgtagtccagtggtttttaactggaggtcatttttgacctcctcttcctaccccaccccaggggacccttaacaatatctgaagactttttagattgtaactgggtcaggtaagtgctacagggatctattggctactcaaggatgctagtaaacatcctatgatgtataggacagtgccccacaaccaagaatcacctggccccaaaatgtcaatggttccaaggttgaaggatcctgttctagaacttgcacaagtaatagagacttctaaatatttagatttagaagatgttacaggggcctctagcttctttctaaatcccagggaagcaatttgtaagtccatccatccatctgtcctgaatggcctcttttttcctcttagaaagagtcttagataataatgttatttttccaatagccgccagttccacattctatttgcaagggactagagagctcttgcccttcctctgtgtgagttcccatggtcctttcatggactttcccatgatgaacacagaaaactgcgcttagagaatagacatacctttgctgagattcactcaatgaaaatcttaacctgtcaatagaattccctgcccacaaaaatggagacacttgcaaagaaatgtgaaaccagagtccacttctccccaaaccaaatgtatggttgtaacaggtagatggtctcacatacagcgcaccagactatgttgttatctttctcttttcacctgaacttgcctctctctggcctcaattctataatctagtctacctttaaacctcacattgcacgaatggcggatgtatccagggccacttcgagcatgcaaccttgtcctaagtaagcttctctgcactgctccttcagaggggttcagttctaaatcttcaatctcaatccagattagaattatagagctaatgttcaacagtgcatcgagtttaattttacatttcctatccagttctactcaaagcatggaggtttttatagaaagaaagctttcaggaaagaaactattaaaaaaagagtacttcaaaaatctctctccaaatttcaactgctttacttacctagtcattagattacttgatggttatctcggttctgagaaggggttttagtgctgcctccacagcagatcagcatatacccagtgccaggttgtgggtatggcatggtaccagggactgcgggagatccacagaaacataaggaaggtctttgcccttaggggttttacattgtggttgggaaaatgggacatatgtatacacatggaaaatgaaataactaaacaaaaggtaaatgataatatgaagcaatcatccaagaggtggcaggagatatatctgctttttttttttaagtgcaacccattgtttaggaagaataaagtttgttatgacttggtttgttcagaagtcttcacataacagatggaatttgaaagagggaatatattctcagggaaattggaaaaagtgagaactctatatgttaaaggctggagggaaatcatttacaatgggctgaagatgctgtgttggcaagctgtagtggagagaccatcatggagtattaggaggtaagcctaatggtgtagcaggggccaggatttagagaactttaaacgtcgtgtgatggaacctgaacttgtttcacaggcaatgggtagtcactgaagaagcacgcatgcaaattaaaacagcttcctaactgatcttgtccttcattcatggtccccatctaatgtactctccccaagtcaggcagaccaattcttctaaaacaaaaaatctgatcatgttggtccctcacttaaaaccatcagatgattttctatggcacctaaatacaacctgcatctcacagtgcagcttacatattgtattagtcaggattccccaaggaaatagaaccaatagtatattgatattggtataggtgtaggtataaatataggtattgatatagataaatataggtataggtataagtatagatataaatggatttatttgtcttgagaattgcttcacacaattatagaagatgagaagtctcaccatctgctatctgcaagctggagaaccaggaaagctggtggtgtaattcagtgcaagttcaaggcttgagaaccagaggagctgatggtgtaagtcccagagtccacaggcccaagaaccaggagctctgatgtctgagggcaggagaagtcggatgtcccaactcaggaagagaaaaatcagccctttctttacctttttgttatattcaggcccgcaatgtattggacgatgccggcccacactggggaggttgatttttgtttactaagtctacagattcaaatgttaatctcttctgggaacaccttcatagccattctcagaaatgttttaccagctatatgggtatcccttagcccagtcaagttgacacataaattaacctttgcaatccagtctcagcctcattttaggcatctttgcacccaaatcacaatgtcccagctccactgtcttctttcttgattacgggattcctgtttctatcaaaggagccctctacttgcttggcctctgacttggatcactcttcctctgcatttttcaatgatccattgatgtctgcattcatgtctaagctcattccacctccttggattgctgtcatatgattctggtatattttcttcatagctcttatcactgttaaaactattttatttatatagtttttcattttttgcttccacactaacatatatatgatatatagagagaaattatttacatatcacttctccttatatatcatatatagatatatatcttataaatatctatgtattgatatattatatatagaaattatgtatgtattatttatctttatatggaaataacatataacataattatatataattatatatttttatatataatattatatataattttatattatatatgttataatttatatatgttatgttatatataatttttatatataattatatataatatataatttttgtatataattatatataatatataatttttatatataattatatataatatataatttttatatataattatatataatcatattatatataattatatatttatataaatatattttatataaaaatatgaaattatatagattaaaataaaacaggacagaactgctagtgtggaaacaaacacactatatatatacatttaaagaagtgtatatgtgtatatatacacatacatatggaaatcagttgggggatagttgcaagtctgggtgagaaattactaagatagggtagggacagaaaaaatatttatacatggaagacatttgcaggtaggatttttcttggtgattctttggatgcacgtggtgggagaaagggagaaaatgtgtttttttgcctttctccccagctttctggtttttaggaaacagatgggcaggtggtattattcacggagggaagcaggctcccaaaaggaaggttagttcagttttggatatgttgactaaagataccttaagatacttgaaagtcaacatttatagacatgtcaaagtggaaagtaatcaaggaatgtagtgatgatggccggctcagtgaggtgtcaacagaaacggtgaacacagacacaggtttgccttctttcccaaatgctttcaaagaaccctctgttgacacctcatcccccacaaggcttagctgcaatcctagacattgaaaatgtagagaaaatttccaaccttgagcatgaaggaagggggcaattttgaaaagaaccctatttaatgttcaagcttgcagcaagttaccgtatttaaagggagaaaatatgacttcccaaattatgaaaaacatcttgagtgtcatttaaaaactgtaatacattctctacccccaacaacattttagaactgcagaaattagtataaatgttgctctattttatagggaggtgagaagatagggcaatatcaagactttattaaattctggacaaattggggaggatgttttccgctatttgaaagaagtcactgatctttttttcccccttttcttttgctttttttatttgggaatgttaagggagaagggaagctgcagaaataccttaaaacagctctgtagggcctttggcaggaagtgtgtgtgtgtgtgtgtgtgtgtgtgtgtgtgcacgtgttacatggagaaattaaggaaaagggtgacttttattgctgaaattaattttattgctatactaactagccctcttcctcctcacttcctggtatcacacagagataaaaaggcaagaagaaatgccttttcagattccgtagcttcctgtagtagttgcagattctggcagcccggtgttaggtttataaatgtatcccagaaaactgcaaaaccacaaacagatacataaagaatgaggaatctcattaagaaatgagcatttatatttttactgggttttacttttaacataaaacatcttgaaaaaagttttatgatttagcatttatgaatgactagattttaagagaattgtaatatttttttagggtatttcagctccatgagttatttcttatagattcagataatgacattataaatctttctgtggaggcaattactaaggcagaaatggcctattccccattggcttttaggttcagcttactgacatattacaagcaggcttaccgtggtcattaaaaactgatctgggatttattgtacctctttaaactctcagtactctgaaaagtattgaacagaaaggaatacaaagtgaagttacaaagagggccagcaaggcaatcaggagagaagtagatttaatttatccattaagaccaccacaagtatggtgaaaatatctgaaattggagcatgaggtttttcatagaggcaaagacatgcttgctaagtgtggctttccacctgaaatagtttcaaatgtggttttagaattgagagttaaagggccattggtgtgagatactgcacaaaaggcgaggtgggttttttagcctttcctgataggtgcaccagctggagacatggagcattatagaagaagaacagcagtctctggccagtactgcgtccaccttctccagcaacacaggccacttagggtgcaaataaacgggcaagagtctggacttatcttgttcatttggatttcctggtctcggtttttctgcttctccccaaatgatattggaataccttttctgggaaaagatatccccagcaaggttcaagcaggtgtgttataacagcacaaaggcatgaagataagagaaagagttagaattgaagacgagagtgagttcatcccaggcaaagcaaggagaaaaatttcctaaagaaagtagaattttgctctaacccttgaccataaaaattaatgctgtcctctaggggtgggccgaggcatcccttttttgtagagttgcttattgaactatggggaactccctcccttttttcaatgagaacacagagatgactagaaaatgcttttatcacctcacacaggaaacaagctgaaggttgagtgtgtgtttattttaccacttgagtcttgcctaatgtatatgacagcctggcaacttgttcatcacctttaaggcaatgctttactagaaacaaacaaaccaaaccaccaaaatcatcatatcattctgtttgtccaaagcacttggtttcccatggctggctccttatcgcacaggtctcaactcaaatgccacccaccgccttagtgagctcttcccagaccttctactcaactccccgctgcagtcacttcaacacgttgaccttttagtttctttacagaggtcaacaaactttctctgtaaaaggttagatagcaaatgttttagattttgtgggccacatggtttctgtcgcaattgctcaactgtccactgtatcgtaaaagtagccacggacattatgtaaacaagcaagagtggctgtgaactaataaaactttttgcaaatatacaggctgtggggacatggtttgccaacccctgctttaagagaacgatagtgtagtgccctaaatttttgtgtgcatgtatttactttccagatttttatgcatctttctccattagatttggagatgaatgaggccagcaatgtaatttattgagtaacctaccactgcagattatggatgtcaactaccactatatgctaaatacataaaggcatatttggtcttccataaacatgggctaaacagatgaaccaaaaagtctccccgaaatggtggttgtgctattgtattctactgtttcgaattgcaaagcaaatctatagtttctttggaaactttggagaataattttttaaacaaagatctttggtttatttgtaaagcaaaaatgttggagtcaaagaacctggagttaattgggggttttccttacagtttggctcaaacccctagtccagatttcactcaggctagattgaatctgatttaaaaccttcacttcacaatatacccctgtttgataaatataacgcaaatattaggggccctggaactgagttttctatcatctgaatctctaatccacagtgcaataaaaggctgctctgcactatagaatgttatgaatcccaaaggaagtagtcactttatatagcttcgttcattgtcttcataacccgttagccagtccacactttcaactgtggggcctgatggagccaatctgatggagtgggcctgtttcctgacactttgaggtattaaaattcttcccagagtttcagatattcttttattcccaatcatggtgcatttggaactcttatcgtgtgctttcccagttgggcttccagtatacgtgtggtggtgatggtgggtgacggtgatttgaagggggtatcattccaacaattaatttgtaaaattttgtttttgaaactttttggccgaaagtcttcatggaaaggcagctatttgcactaatggtattatttccatttggaagcggatttagaaaccaatatttggcatgttttacagcacagcaagtttaccggattcctaaactagctgctctcaacagttagtggtgggctcctggtctcgctggcttcaggaattagcttctatcaaaaatcacagaagatttactcagatacctcccttttcttggactcagtttaccaccaagacgactacattcactagaagagaaaagttctataatacaaagccccagtgatctgaaatgctctgatttttctgtccactaagactcatttctaactgaggaaggctcttacagacctgagctctccttgacagccctccaggccagtgccatacacatcgatttgcacttgagcagtaataagatttctctattgttggtaagtattgaatccatctgggagtcactggcaggtcatagagaacgaagaatgaagataagtcttcagtggcactcagcctatgcatgattgtggtggttacacgttagcttttatctccctgtcacccctttgcagggttgggagcctatgcatgacttgtggtggttatgtgttagcttttatctccctatcactccttcgcagagttggggtggaaggagttgacctctgtttcctcataccaggtattctggtgaggattttaatcaagatcttccattttatgaactgcgacttcaaatgggcctctcttaataggacccattatcttttttgtcaccttgttagtctggcatgaactactaacagttcatctttctggggtcttccctaggattaacagacactgaagagaagaaatctttccactggagttggtgagctttaacagtggatcccagagggtggggtatgtggggtcatctctcccatcacattgaaaaatacatccaagcaaaggtaaaagctgagcaggactgaaaatagaggaaatcagacagcctggataatatcgaccttccagatgcagtcttacctgaaggtgatcctacccctagacttctcaactgtatgagccagtcaatggtccccttttaaattgaagtattttatttgggttttctgtcacttgcaaccaaatgaatcttgattaatatggctatgtatttctgataattctcaactttaatctgttacattacacacatagctctatatacctctgtcctataactctatggtataaattttctttactgtaagaaagaccttttaagttgcagttcaatgaattccctgtaatcttattcttttggggatccaaataaaatgtaagttgtagatcaattgccaacagcaacctagtatctctacaaaactgctttatcattagagagatacaccaggacccctttctcttgaaatgctgattagatttgtttgcagtagaccaagtacattcttgaaacaaaaaatcccaggtatgcttgctggagaaccacagctttacaggttctattgggtccggaattggtgggttcttggtctcactgacttcaaaaatgaagccgcggacactggcagtgagtgttacagttcttaaaaatggtgtgcctagagttttttttcttcagatgtgtccggagttttttccttctggtgagttcgtagttcttgctggcttcaggagtgaagctgcagaccttcgtggtgagtgttacagttcataaaggtggcgcgtccagagttgttcattcctcttgtctggagttcgtccctcccagtgagctcgtggtctcaccggctccaagagtgaagctgcagaccttcgtggagactgttacagttcataaaggtggcgcaaccagagttcttgtttcctcctgtcaggagtttgtctctcccagtgggctcgtggtatcactggccactggcttaaggagtgaaactgcagaccttcccagcaagtgttacagctcataagagccacgcgcactcagtccgcagcagcaacatttattgcaaagaccgaaagaacactgcttccacagaccgcaaagaaatcttagcgggttacagatgttagttcgggtggcctacttttattcccttatgtggccccacccacatcctgctgattggcccattttacagagagctgatttgtccattttacagagagctgattggtctgttttgacagagtgctgattggtgcgtttacaaaccttaagctagacacagagtgctgattggtgcgtttacaatcctttagctagacacaaaagatctccaagtccacatcctcagaagcccagccggtttcacctctcagtggcactcacaggggactttgtggcacctagcccaggcactccagcagcctagagagagttcatcccggcccgctgagcctgtgcctaccaggaacccatgctggcccgcgagcgcagtgcacagcccggtctcctgccagcgcctcttcctccacacctccccaggagcagagggagccggctccagccttggccagctccagggaggggcccccacagcgcagtggcagactgaagggctccttgagcacggccagagcagatgccaaggctgaggaggcgccgagagcaagcgagggctgctagcacgttgccatctctcactatgacatttattttatatttatagtatttttactgattcctcatcttggacctttcatattatatttattaaagtgttttttgacagacaaacgtctctgtgggggggccaggcatggtggtacatgcctgtaatcccagcactttgagaggctgaagcaggcagattgcttgagctccagagttcaagaccagcctgggcaacatggtgaatctccgtctctacaaaaaaatattaaaaaattagccaggcctggtggtgcatacctgtagtcccagctactcaggaggctgaggtggtaggatcacttgggcccaggaggcagaggttgcagtgagcagagatcatgccactgtactccagcctgggtgacagagtgagaccctgtctcaaaaaagaaatgtctcagggataactcagcttgggtcatgtgctgaccaaaagatattcattgtggccagagaggaaggaagctctatttgatgtgactggggtcacccatctttgaatcaaagagatgatgtggcccacctcaccctccatataaattttgcaggacctatctgttgagtagaggagggctgcctccaaagaagggataatgaggagacaaagtaaatatgtgtacagtgctcctatatgatgcttaaattccctatagaatagcagaatatcgtgaacttttttgagtgctttttacgtatcaggctcagtttcattaattgtacagatattatgtaattttcacaataactctgaagtgggtactattaagagcaacacaatacagatgagaacactgagaagatttaattgcaattgcctcagatcacatagctagtggtgagcatgactaaggtcaggcccaggcagccacatcccagaacacatactctaaaccatggtcagcaaactacacctgcagatgaaatccagcctgctgcctgtgcttgtaaatagttttattagaacataactacactcatctttttatgcgttttctttcgtttgttcttcttttcttttttttgagatggagtctcgctctgtcacccaggctggagtgcaatggcacaatctcggctcactgcaacctctgcctcctggattcaagcgattctcctgcctcagcctcctgagtagctatgattacaggttcatgctgccatgcttggctaatttttgtatttttagtagagatggggtttcaccgtgttaggcaggtctcgaactcctgacctcgtgatccacctgccttggcctcccaaagtgctgggattacaggtgtgagccaccacacccagcctgtttatgcattttctatgtctgttggcatgttagaatggcagagctgagtagttgtgacagaaaccacaaaacataaaatatttattattgggcttttatagaaaaatgtttgcctacaacgcctcagatcacccaacttccccttaaacagttttgagtcaagagactcatcagttcttgcatagcctattgcatttccagatatatagtggacatttgtactgaattttggttgaccataatctcaatttcttttgtagacttaatgaatttcccataatgtcataatatgtgtgttggtgaaaggtagagcccatataccacatctaagccctgaagaccagatattcattttcctggctcccttgcagctaggcttgtaacataagctcaaaacttaggcttggccaatcatacctatttgagaccattaagcctgaaatgttgcaaagaaggaacaatgtagacccttgattgcattagtcaataaggcagaaaatcttattggagataattttcagattttcagaaaaggtagatctcccttcagctcttcaaactaattttgcttttgtcattagtataaacaccgacaaattatcaagagtctgatagctcatggctcccccttccaagtactatttttagagataggaaggaaggatactttgcctttccatgaagtttatctctagatttaccttctagtatgccactgctgtggaattaacagatctttttacactagcttctgtttaggtttttaaattcgttttttgtttgtttgatactgttgttttttgcatacgtatgagaatgatatgcattctcattttattcatttaagagaattgagagagactaagcaactggaatagcactcagtatcccagctccctagcttatgttttcaaaattatcatattatttatttattgcatgcatattcatttgccatttgcatgacatatttcatttgatatcactgtccaaaaatggtaggtgttcctgccctcatggggcttggaatctagttgggaagttgaagcaaaagctgatgaacacaagacagtcaaaaaaatagtcataaattgtgttcactgataggaaggaccagacaggatgctgaaagagagaatatgagcagagggtggaggtggtggtcagggaaagcctattagaggctatgacctctccatagggtaaggaaaagcaaagcattgcaggcagtgaaacagcatgtaaaaggtaaccatccacatgacagccagaataaagcaaaaattccccaagcatattattcaacagcaattgcaaacctgcgatactgagacttaaagagaaaatggcaagaggtctggaaactcatcccaacaatgaattctgagtgccaggatgtgtgtgtgtgtgtgtgtgtgtgtgtgtgtctgtttgctcaagcaggcttgtttttccacttcctcattttcctaatgccatcacacggctgcctcacctgaatgccagtcgctgattgaggcggcagctctagatccagggaaacaaaggagaaggttgctatagtaacagagaccacaagaagctaccatgagagctcctcctctttctctccagaatccctctggccaagggaggcaacagaatggtcctcccagctgtggggccctcagggcatttcccaggcacttagctagtttgccaactatatcccttttgacagtttaggaaagttactcagtctctattacctgctgtagaagagagaaacgacacagtttagatgtttctagactggatagtggtttggaattatttagcaattcttcattcctatggtccctttctctcttcatcaacctctatgcacataaactatgcatcaacttgtatttgagacatgatacccatctacatttaccaggcaaaattgcagtgctccctgatgtactctaatgtgagtagttgcccaaaattctatgacttctcactgttccaaccgtgaagaagagtgattttttgaaatattcatgtcctgatcaattttaacaaatcaaggtatctgtaaaaagataatgcttgacagcaaatgaattgaagctgttttaattggactgaagtccccttgtgagaatttaatttcttttatcgacagttccaggaatccatcccagataagttgggatctccttataaaataccattctctcctagctttgcatactcagacattactcctgtttttgggtgcagctaaagtcttacttaatttgttgtgtttccattctagtccttagtcttcttggatgcttttctggaattttagccactatgtggcccatagctacttatgttttcagtttacgttcgacaactcagtaaggagatacggttgagaacatagaatttagagttgggtggaactgtgtgttaatgctggctccattactaactgttttttattgttgggatcaaatcttggccaggttacttgacaagcctcagttgttgcatatgagaaatgcatgtaaaaatactatgtattttccatgggtatcatgatgattaaatgcatcagggtacctaaggctcaaggccaggcattatacctgttgtaatgagggtgtgaggatgtcatcttagctgcccaacaggactgtgggctccccaaggacagcagacagcacctcttcattctttccccgctttccatatagcatgtggcaaccatagacatgtagacatgacaagtgataaaaaaggttcaatataattatatttattctgttaattaagcagtttgttccccatcccaattatatggcatatataagaaagacagggagaaaagaaagaaagaaagagagagagagaggaaagaaagaaagagagagagagaggaaagaaagaaaaagaaaaagaaagagaaaaagggagagagagaaagaaaaaagaaagaaagcgaaaaagaagaaagaaacataagtatcagaagccctagctaggaacggtatgcccccagcaatctctcaacttcaaggttctgagggaactttaagaaaaagttcaatcatttcgtttgtggcagccatgcctcagtgttctcataagcttcaattagcaaaatactttcacatttcctattgccaccaatacgagggcttccattgttggaaacagatgagaactttttcactccacatggagttttcttcatgacactatctaatgtggttttgctcaacagttttgaattgctagttccatagggaatattctttagcatgtgtgaaaagtgatgccaatatgtacataaggaaatattaatgcacagaaaatattctcaaaaatagtgtcttagcctttggaaatgtttcaaatggttatctgggtagatcttaaatgcaatacattctcgttcttcaaaaacctcttcctgtcaatgttgacactagtgagagctctaactgggaaaggagacgcgcagcatgctaatcaaaggcaaggtggccttgtggtcttatggctagttcttactcaggcaccaggtagaaggaacagattggtccatcacagatgcttgattctctgactagggttcaaggaccccttgaggtctgagaatattttctgtgggttggagtgctcccaggtttaagacacttccccaataagtcaaattctctttgtgagaagggaacagaagtatgtgttcaggtagtagtaggatgttgagggaatcacaatggagatcttaaaagatattgctagaagctgggtacagtaactcagacctgtaatcccagcactttgggaggccgaggtgtgtggatagcttgagctcaggagtttgagaccagcctgggcaacatggtgaaactcatctctacccaaaatacagaaaattagctgggcttggtggcgcgcacccgtggtcctagttgcttaggaggcagaggtcgcagtaagctgagatcatgacactgctctccagcctgggtgcgggtgacagagtgagactctctctctctcaatctctctctctctctctctctatatatatatatatatatacacacacacatatatagcttgaatttgttttataatgcagaataataatactttgttataattaaaaataaagtatgtcattatatgaagctaaaataacattaacattcatttgagcattaactcaactgtcaagaactgttctatattttattgagactacatatagtaaaaagcataggtcttaagtgtattgatcagtgagttttgacaaatatatatatatccatgcaaccagcacctaatcaagatacagagcagaggctggcaaattgctatctgtgagccaattcgaccctgtggaatgttttctgtgtggcctatgagtgaagagtgttttttttacatttttagaaggttattctttaaaaaggcaaagaagaatatacaacaaaaaactatacatggccctcaatgcctcagctcatcaagtggcctcaaggggggcaccattttctattaataatttgcatgaagggtctgcaaagctacctgtgactctttaatatgtgctcaattcgtattagttaataccttacatggaaatgattttagttgataagctttatggaaaatgagaaggtcttttagcagctggtaaagaattcaaaatgagtccaaaagcagactagcaaatctcaattctccttaagatagatgacttatttatttatttattctttttattgagatgacattcatgtgacataaaattcaccattttgaagtgagcaattcagtggcatttagcaaatttagcacaatgccgtgcagccaccacctctatttagttccaaaacattttcatctccacaaaaggacaccacctgtatccattagcagtcactctcccatccactcctcaccccctacctttccaggctcctgaaatcccctaagctgctgtatgtttctatggatttacctattctgtatgtttcatataaaacgaatcatagaatatgtgacctttcatgtctggctttttccacttagcatagttttctaggctcatccacattgcagcatagatcagtacttcattctttttatggctgaatagtatttcactgtaggtatagaccagaccacaattcatttatccattcatcagtggatggccctttgggttgcttctacaaacctttaggttattgtgaatggtgcttctatagacatgcacctgcatggatttgtttgcatatctgtttcagttcttttgggtacatattagcttgatgtttttgaaactgcagtctacggaggtaggtagagatatttgatgtttgggtggtaatggtggaaggctctaggatttctcaggtttgaaagccactgtatattttctttatacaaaatataacagtataaaagtctcagccaggtgagatggctcaagcctgtaatcccagcactttgggagccccaggcgggtggatcatgaggtcaggcattcgagaccagccagaccaatatggtgaaaccctgtctctactaaaaaatacaaaaattagctgggcatggtggtgcaacctgtagtcccagctgctcaggaggctgaggcaggagaattgcttgaacctgggaggcagatgttgcagtgatctgagatagcaccgctgcactccagcctgggcaacagagtgagactccatctcaaaaaaacccaaccaaccaaacaacaacaacaacaacaaaaacttgcttatccatgtggggaaaaaagtgaacagtagtttattgcaaagcttagtgaatcctttagtaatctgctgaataaaaatgctccactgagaggcagagatgccagaaggcttctttggacagttaattttcccaagctttgcagagcacttgctgctgagatgtcatgtaatgtcctcactgggttaagtagggctcctttccacccttttagtttagggctccagataaaaagcaagaagcccagttaaatttgaattttacataagcaacaaataacttttaatataaatatctccagtattgcattatttactgtttttctgatattcaaatttaactgggcatcctttatttttagtcactaaatctggtgactctatttttattgccctgggagagggtagctgatttgcagtgaattgtagaagataccctatcagcggagatgctttgctcactcattttcccatgagagagccatttccctttttatataaataatgtaaaaatttggagataaagtatgtggggcataaggaaggtgaaatggagcctttacaacgtaaagtgctttctccctggccttagttcattagtgaaatctagtgatttaaattacccagctaacctcttccgccactgcaagattataaatcaagtaggtggctactacctgaaggagttgtagggtctttgcagaaggttcttatcaagctaagaggggcagaaaatttcctattactgtgtcatgcataaatggtaatgcctgaacctccacttacagcatattacctctatgcaattcactggctaaaataaaagaaacaaaataggaacattttcgcttctttgcattacagaggaataaataagatggcaagggtctgtctgcaaaagggctgatgctatgaaatacttcaaatgctaccagatagagacagactcaattgaatacagagaacctattaaaggtatttatctgtctgtctttctccctttatttttgtctgtctctgtgcctttactttgtgtgaaattttgagagatgaattccattttctattaattcaatggctgtcatattgcattacatcatgcagctcgaatcacaacaatgagacgttagggtttaaattaataatattgcaacacatcacttgctaaagcagtgtatttaatcccatctagcctgctcaggtagcctgacttctgcccagtgccttgaatctgcagattgcagtagaattacccaagttcaattgcaaacaacctataattgtgagctgaggacttgagcttcatggtagaaagcattaatttaatatactggtgagatgtaacaagcttaatttcttttagtaaaatggttgtcgggggggtggtgggtgcagggattttgaggtttctgagcagcattttctattcctagaaataccctcaacaaatagttgtgctatgtacaattgccttacatggtgtgttaactaaagccgccaagaaagggagaagctggagggatacaggtaagagaagatcctttgaggaacgtatagatttggtgaactgttcagaatgcatttccacagacattaaattgagagcacaacccctccccaaatgactgtagcatgaacattcaacccatactgttccacgtctgaaagagagtaaaactggatgaacaaagaggaaaatgagtccaaagcacatcaaaaatattccttacccaaagcagattgttctcacagggcttttttcacgtgcagatgcttttactgtggaaacaaaacaaaataattaatgactctacatttcaggaagcgagagaggcattttggaaatccgaatactgtcataagctgcataacgactttttggttaaccagggattgcatatacaatatttctgcatttaggtatgtttagatacacaactactaacccttgtgttacatttgcctgcagtactcagtacagtcatgcactactacacaagtttgtagcctaggagcaggaggctagcccatatagcctaggtgtgcagcaggctatgccatctaggtttatgtcagtgcactctgtgatattcacacaacaataaaatcgcctaacgatgcatctcagaacctaccctcatcattaaacaacacatgactgtaattatcaccagcactaagagagaggtatgtgaagggccagccctctgagttcctgcttcctggttccctccgagttcccccatacctctctggagcccctgatcgcttcctcgggccatgtacatttccaaccatcaccagctctagataaacaaacagacagaggattcgtatgtggccttcgttaaggtgggtgccaattgtcaaattagtttctgcccaacctgccgagtgcaaatgcaaatccaccacccccggcgctgcctcatttgcagttattgattcatgtttgactgtgagttcaaaaaatgttgtctttgaagcttccccatctatgcttggcttcctgggtccaggtggctcggggatccctggcagtcattttgatctctgtattccaaacaccaacgcaggtcatttcaggtaacttaaaagcaagatacaatcagaaaggatttggaaatgaagtctttgccttgtcacattaatgcggtcctatcaagtggtagtttatcaagagccacctcacaaggttttaatgagcatgctgcttgttcttgtacaatactaattaatcccattttttcacactgccgtgattgcttcatgaaacccacattgttttatactcagtagcaaagcgcctcttactgattaaatctccttgcctgcgatggagcctgacaactgaattataccttgctcaaaataataatgggtatcagctaataaatacggtttaacacacacaaaactatgcagccaaaatcacaccacaaaataggagtttgacttataggctcagcagtgtttcattaaacatctgtattataattcactggttttccaactgatgtaataacttaattgatgagaacaaagacaagcttatttattcacccaattgcttgcttcttgactaacgtttttcctgggtgttattgtggaaataaatatgcaatattctttttatagaagtctaatttaggtcctttttttcccctattgagaagtcagcatcaccatctgtatctgacaaattcttgctgctttgcaacggaagcatttcgataagatgggaggtggtgtttaccctgatattcagactggctagccgatgtgagaggggaagcattggtctcctagccccctgggtagtgcatgatgagtgttccctgatttccctcacaaggctgaaaatgccatctaatggaacacacacacaacacacacacacacgcacacccctctcatctaatgcgttaaattaattccaccaaagttgagctgattttgtgtgtctcatgaaatggcacggacacactcatctccagcttgtgtctccccacccacatttaagtgctaccagaaaccaaccaatttggtgagaaaatcacacccagaatttttaatttgtataaggtctgtttcagctggatatagaagccaataactggtgtgatttttgtcatccctctagctttgggctgtatgtctttcagtaccagctatttaataaatatgcattgaactctctgggtttctttttccatgaggtaggctgttggcctgatttgaccacatcttttcttccagtgatgcttcggggaagcctgagtgctttcccaatctcgtgaactttccactctgctcacactctatgtagtcgccagctcaattttctgactctgaccttgactgtgaactccatgaggatggacacttccaaataatattacttgagaactcagttatgtttcaggaactgttctaagccttggggatactctgattaagagaggaagtcctggtgctcatggagcttgcattctactgggggagacaggtgagaatcaggcaagtaagtgcatgtataatacagaatatgatatctgccactgataagtgctatgaggaaaaatacagcaagtggagaagtatgttgtatgtgttgttcacctagtagacactcattaaatattggttgagtcagtgcaaactttgtcatattgatcccacattcttgtgctgtgtctactgttccttcatgagatggttcaagaggagctgattccttcaagaaatttctctggagcatgcaaacattcctttgctttgccttcttcagatgcgcactggccatgtgcatccactattcatacatattcctttctctgatcttactaccattcttgagtggagggctgattatcttttggccttgtatcttttgaagcagtcatcagagggcttaccagttctctaatatctacatttcctgcctcttacgtaaatcttgtttctatatttcttggtgtctacaagatgtcaatgtggaaatgacactgttatttagtttaagtaattttctatattgacctcttgcgtcaccatatcccagaagatgtcaatacaaattcaacctccttcctggtttctaagaatcccagtgtggcaaaggttcttctcccaaatcctcattcttctagtcttgcagcttatatgacctagagccaattatatttcagtcctcccttcacttctcaagtccattctgtccccaagtcctgttgacacttctgtacatgggtggttcctcctttcttttgactctgtctgccgctaagttggccaggacctcattatcagaccagattttgaaagcatttctgattttagcactttttcccttacgtgcagtctctatgctattccttaaaatgttaccttcagcaaatctctctcctgcttcagaacttcagtttctaatgactttatagaaacatgggcccagtgttgccagatcttctattttttttctttttaggaaagcccgaaatatagatttttacatgaaatcttatgagttctgaatattggcaacttattcaaagacgttttaagccctatgtagaccaaacaaaaatactatcaaatcttcaggcaatatttgatttattttagaattttagtattcagatcctgttgaaatcaggatccaagtacaattcacatattgcagttgggtgacatgtctcttaagtccctttcaatttacagttttctctttttctttttttcacctgaaatttgtttgatcatttattttgcagttttccctgcagagtttgtcacagtctggattttactaatttcatcatcatcatgtctgatgacatgttcctctgtcccctgtattttctgtaagttaatcaatagggcttaatctaattcaggaccacttcttttctggagaggaaggactatgttaaagatagtgttggtttctccatgaggaggtacatgctgtccagttgtatctattttttctggcatagcagtcattgatcattgactagattcattcttttattcttgcaaaatggtgatatttaattcaaatgaaccttttaaaaacatgaagactaagcaaaataatttattatgtttatatttatttctagaactagcctaaattacttaccaatacacttaccaggagcagattcattttttcattcacatgtgcaaggagatacgctggtacccggggtggaaacaccgaagacactgtttctgctctggaaagacaccaattaaagtggcagacagagattcgtgtgggagacagatgtaagaaccaacattataatcacatttcttaggaatcaaagaaatatggaactagagaagaagagatgaataactttgcctacgaaggtcaagaagacttctcagagaagagcttaaacagttaaatcaggaagaacaaatataagtttactaaatgaagaaatataataacaatagccacagcactacaaatactctaacacttaccaaatatcatcctaagcattttacaagtgttaactcattgaatcctgactaaaagccccaaattcaagagatggaaaaactgaggcacagagtggttaagctttacactcacggccacatagctaataggtgacaaagcttcagagaaataatttataacataaaatgagatgttcatggtttgcggatacaatcttctcagaggcagccttattgtgtggggtcagtgttttataagcttcccagtcaagactgggttcctcatgacctaggagtcaattccaatttgtccttgataaccacaagccatatgaaacagcatcaataataaccatgaaataaaaagtgagatgggcaagagaatcttgtctattatcaatgaattatacattgctgcaaaaaaaatcatgcattaaaaaaagatttggacttttatgtatggcagtagttcattaatcgcatgaattataattcactgatttcccaagtgatataataacttgattggtgagactaaaggtgagctttttttttaacctttcacctattaataacataagtttttttccatagttatgggagaaattaatgtgtactcttgtttattatttaaattctgagaatggggattttggggttttatatcccacaaatataccgaagaaggagtttgaagagagtgttcaaaaagttagtgacaaccaagtcatgaaataatggaaatgagaggtcatttggttctgccctcggcctctaggacgttccttttgcctaagatcactcagactgtagagctgcactcattaatcggaaaatacatattatattcctgttgccatgaaccctgggaaaagagtgtgttcacctaaatttgcacttaaccaagtcaaaaatgttagagaaatatgtgacaacatttgatgaacttcagggagggagcaatgagctcctttttccctgcggatattcttctcatttttcaatttaggtattaaagttatctgtgcacttaaaaaaatcagagttagaagtcttaaaggcaaaaggagctattttttccttagatagttggacctgttaaggatttctgcaaaatgtaaaaagacctacattgaaattatccaaagcacccatctatcttattataagctttgatcatataaagttgcgctgatgttaagaaaaaaagtatcattccattgttcagatttttttcttgagttttgttcgttgattataattatgatgtgtgaagtaatgagcccatacatgatcggtaagacagaaagatgatttattgtttggggaagatttatgcaggaaaaatatgcagacaacagagaactaagtctcaggatgtaattgattaaacaagacagggatctaggtcttttgccttgacacggtgtagttgcctcctgaatcacacgggttgatttaggtattttgaagctaacaggtagatgtaaaagttggatgtttgctccacttatgtatgtgccaaggacaattttagattttgtgaattagaaaagggctgagtagaggttggaggagccaaggggattgggaagtatatcagggagaggctaatgtgcttcagttttattgataaatattacttttgccatgattattgcactgtattgggatgtatcattgactaaatgtctgtatggacaatgggatgcaacccaggtgatgtttatctcttcttttcccatgattagatttgactgccttttagtttacaggtgaatgctcacattctaatcagagaagatgattgggatataaagcattctcagaaaccaggaagtatgcatttctgaattcctgtttctccctttgcacatcactaaagtattttttcctttccatctattgcacctgtatgaatttgaaaagaatctaaaaagacgcttattcatgttatttgaaaacaaggtaaaacaaagacatttagttttataattaggtaggctcaccctttgttgatgatttgtggcatttgctgacattcctaactctatttctggtattctatccttactggccagcatctcataagaaatccatcacgaagtctcataaaccttcatgctaaagtgtgccacaaaatatcctcttctctctatgcccactgccctggtcagcacttaaccttccaactgagttcggcttctcctctcctgccccataatctacatactacctagcaactagagctatcgtgcattatcaagtgttacccaggtcaaatgtaaactagattaatcccctgctcaggatgctcccattgcttcacatttcaattagaataacatccaagcacctttctgtgcctgcaagatcccataagctctagtctctttctacttttcggaactcttgccctctgtcttctagtcatgctggtttatttgtgtccctcggacaccacgctttcttgccttggggattttgcaattgctagacacttggcttaaaaacagttctcccgtggctgccttcatttctccactcttgtttcaggcttccccagagaagcctttcctgaccgatcagtctaaagtcttccccttctttggttactgtcatctcattaatcttacattatgacatgttcttatcctttgaaaggcggggtctctagttgtcttgtacactgctccaaccccagaggtaggaatgatatctattacatggtagggactctaatatgtgttacaagaaataaaacccaaatctaagtaattgtgcaaattaccatccttggtctattctgatgctatatatcagtgtagtgaaagaaatacaggaacattcaaacctgaatttgatcctaaactcttgtcacttggttgccacatactaccttgtttaaactctctgtaatagattaaaaacggccaaagattctttgctacacccttcaatcataggtagaggctaagtgcctatcaagattagccttaggcttgattatgtgacttactttgaccagtggaacattactctctgttggaataaactatgcaagctgaggcttgacaatcactagcccattggtgcttgccctgttggaacctgcctgttggaactctgcataaagattccgttgctgcaaggaagatggtttggctcatgtgagagatggcttgcagtagaatcaaggtgatctaactaataggcagcagcaacttccgggcttatgagtgaggccactttgaacattacagcacacacctgctcatctagttgaatgcagttgtatgaatgagcccaaataaaaccaccagagaaactatgcagccaactcactgaattgtgaaaatgttacactattattgttttaagccactacatattatgggtggttcattattcaggattattggaagacccaatgagacaataaaagtagtctccagtgcattttcaattcataatagaaactcagttcttctcagttccctgtcattattctggctctgaacttggctggtgaaatttccttagtcaaaaatctgctctgatgtgaccacgtagacaaatgatgtttgcaaaacatgtcaggagatggattcaatcatgcacagaagaggtgggactttagctcaattaaactcattctatggccatttctcaggatgattaaggtaggaaattgaagtatggaagcaggttaaaaatacatggaatataaaataatggctgtcatttaaagtacttactatgtgtctggaaccatactaaagcactttatatacattgtcttctttatttttgacatcaactgtattttacagaggagaaaactgaagtttatataagttaaataatttgctcatgatctcattagtgaatggcaaagctgggtgttggaccctggtctagcctactctggatctactatgaagcccagccttcaaaaagaggttaaaatcgcagtgtgggaatggggccaacctctggtacagaggttgatctattgggaagacaaataattaatgcagatagtttatgcctcagagccaataaacattgcatcaattctaagtgttatggaagttcaaagaaggactgttaaggccagattgtcggcagaaattagggctctctagaggaaggaggattggagagggggctcaatgacctaccacctgtaccggctagcagacactgtgagtttaggccttgggcttagagtattatgtgcattctttgtttcatcctctcaatgagatggggatgattgtgatcccattatcagatgaggatatcaaggcttacaaaggttaagttacttgctcaagattacacaaccaattttttacagaccaactggtggttggaacccaggactgtggtgtgggattgcccctggagagtgctgcatccagaagatgagtgatatttagggaaatgagaacagcactgggcagaggaatgagcagtgtgtgtgtacctgaatgtgtgtactgattgtgtatagatcattatatacatgtttatgagtatgtgtctaggattagaaatcagccaaggactccagataatgatagtttaggccaaagttgggggagggcataccaaaacataagtgattcctatgatggggcagctttgaatgtataaagagtgttgcagcgggcatttgttattgttgcttatccaatatctttttcctattgttttgggaacagcactctgtttgacctcttgggaaccacatatcttacattcttagagctagtgacctgaccaatcagagctctgaacactctaggacagggttccccagccctcgggccacagaccggtactggtccatggcctgttaggaacagagtctcacagcaggaggtgagcagcgggtgagtgagtgaagcttcatctgtatttacagctgctccccactgctcgcgttaccacttaagctctgcctcttgtcagatcagcagcagcattagattatcataggagtgcgaaccctgttgtgaaccatgcatgcaagggaactaggttgcatgctccttataagaatctaatgcctgatgtcatctgtcactgtctcccatcacccccagacaggaccatctagttttagggaaacaagctcaggggtcccactgattctacattttggtgagttttataattatttcattaaatattacaacgtaataatagaaataaagtgcacaataaatgtaatgcacttgaatcatcccaaaaccaacccccgaccttcagtccgcggaaaaaactgtcttccacaaaaaccagtctttggtgccaaaaagattggggactgctgccctaggacatatttttagttgacaaacaggcttataaagcaatcagaccaaggaggaagggctcctttctgttggaatgaaacaggatgggatgtaggcctggaggggctgacagccatgctgatatcatatgaacctgggaggggagccaacttggagaggagctgtgctgagggatggcacgaatcatattctggggattcagtgacatcagtcaacaaggccccattaataattaagccagtttaagttaaagatttctgttattggctacagggcgcagaggaacgaaacacttgatataagatttaaacaaattgaaaatgtttaaattaattattttctttttacagatgcactgaaacttttattcacaaacttaactcaaagtatcctaatttaagacatagtcagggagcaaagagagtgcagagttaaaaattactgtctttaaagtcagtagacctgagttctagtcttacctctactgctttattttaagaatgtagtcattaattcagttaaatagccaatattttttgaatgcctgtccatatgttacaaactcatttcacctgagcatgatatgaaaaaaaactaaaatttttagccatgtaatatgtaatttggggtaagtttttttttcatttctgtaaactagtttcttcatttgtaaaatggtaacagtaattgtaatcaccttatcacacatgaatgatactttgagtcgtattttgccttttgaacatatacagttatttgaagaaaggtctttaccttgaaagacatgactagaaaacaaagatacatatgtccttgggtgtaaacactcctgtctgcaagggtctagctctgatgaactctgaaggtcatttccaagagagcagtattagttaggatgcagaaaaggctgctgctatatgaaaatacaatggtttaaatgagcagtaaatggcgtttctctgatggaacagtgcagaacatcatccaaggtcggtaaggtgacttaaaactaccagggacattgagctttctgtcttactactttgctgcctctagggtgcagctcttgtccacatggtatagatctcatcctcctggacaaagatgcctgcgctcccaccctcaggaagacgggaggggagaaagcggagggaacccctcctttcctgttaaggacacgacatggaatctggaaacttccacttcctctcacacctcattcgccagaacttagttatatggttatatcgaggtgcaggggagcctggggaatatagcctttagctgggctcctttgtgccaaacaaaaactactgttactgttggacaaggggagaataagtattgggggcacctggcatactctgccacatctattattccatatcagaaggaaggaaccgcacattcattagctccaaatctgttcttgcttctgggtttcagccattccttgggcagccaagtgggcctacttccatctggcctgtgccgtaaatcctcttccctttgcaaagagcatttcttgcatgtaaagcgcagaaatccagggccatcagcctctcctggagttgtgtgtgtgtgagtgtgtgtgcgtgcacgtgtgtgtgtgtccaaagtcattctttggcggaaggctacctctatgtgaataacgggcccacttgtattttatattagcttctgctttatttcataattttttaagggaacactttttcctctcatgcaggaaaatctaattatgcagtgacagcagttggctgactcgggcacaacacaacatgtcaattttcagttgcttacacggtctcacagaaactgttagaaattgttttgaaatctggcatacatttcagtcatgttaattcctacaactgtgccaaactagatgaaatttggctcctccacactctggggaaggtgggggattgagaaaggcgaagttgttgtgttttgtttttttttttcccggcagtgacatcatctcttcatcctccccttatgatgaacggtgtcctcaaacaagccaaaaagtaatataactttatatttacaagaccgagtgacaaaatgatggccagagactggagctgtgctataaaacgattgaagaaatacagatggcatgatggtttttttttcttccaacagatttgtgccagatgtgtgaatattgataatttctctggagctcaactcaaggcacaatatagatttctgtttgatggagggacaggagagtgagaattcatcccagcgatggtatttacaggaaatgttttgcctcttcttccaaatctgtcaaagcagaaccagaaatcccaaatttccaaatgagcctctgagtcaccctttgttctggacccaatttttatctcctcagtaattgacagactggaaaattcatttgtgaaaacatgtggtaggtttctaaaagtggagcctctcaactggctgaactgatccctgtgcatcaattcagggcatgagtagtagcaaaatcttagaaaagcatcttagaaaggtatccactttatcatcagtcttctccatagaatcttaataataaaaatattttaatagaatgatatttttcaacacttgtgatggaaaaacttgaaaaaatgtacttatttccaaagctcttctaggtttcctttttattctttctagtattctaatacccctgaacccattttaaaataagattctgggagccagaaaatttcaataaagttcagttttttaatccaactttgattttgcttaatatcagacagaattattgaaaagatttttttaaaaaaacagaaatatttattattcttagaaagattcagctttgatcaaataattaagcaagtcaatttcaaaatcagtataaaaatgttttcatatctgtaccttgctatcttctgtgaagcatttcaaatgactttagaggaagacatctataatggaaaacataagtagagaaataaggaagagaggcaaaaagacagagaaaataaagaattagaaaacgaccaatgaaaattgcccaggacattgggaataccttttggctatagttgaaacttgaatttgccttcgagcttcttggtggccatagcaaaaatggagacatgatcacttacatcattttctttatcagaaagcaaggactacatcagttccttaggggaagaaagtttactcctaacattgaggtattaatggtggttctcaactgcgggcagtattaccccctcccctggaatatttcgcaatgccttgaggcatttttagtggtcaaaaccctgagaggggaggtgctgctcgcatctaatgagtaggggcctgggatgctgctacacatcctacaagcatcttcacaacaaagaattatctggccccaaatgtcaacaatccaaggctgagaaatcctgggttataaaataaatttttcatgtggatattcataatgtcctcggtgatattcccacagcacatggcttcggaacaaggcagatccaagtttaaattcatgctccaccacttagcggctgtgtaacttttggcaacttggttaactgttctaagtctcagtttcctggagataattatgtaaatcctatagggttgttataaagattagcaggaatcacgtttatagaacatctagcacagtacttggcacatagggaaagctcagtgaatgttagccattaaaataatttcataggcagagagaacactagagtgttattccctgaagatggttgtggtctgagaggggctgaagggtgaagttctattgtgaactgtttcatctattgatagccttaagaaagcctagcggccaggcacggtggctcatgcctgtaatcccagcactttgggaggctgaggtggggtgatcacgaggtcaggagatcgtgaccatcctggctaacacggtgaaaccctatctctactaaaaatacaaaaaattagctgggcatggtggcgagcacctatagtcccaactgcttgggaggctgaggcaggagaatggcatgaacccgggaggcggagcttgcagggagccgagattgtgcgactgcactcctgcctgggcgacacagcgagactccatctcaaaaaaaaaaaaaaaaaaaaaaaaaaaaagcctagaaacgtggatgaatgtatacgatgaccttccatgggtatcaccaaagggacagtttgaggctgaaccctcagccaggagttcagagtgctgttatttgtagttgttggttgagcgctgtagcacattctttagaaataagataagcaggtggtagaaagacatattaaatactacttatgctggtcaccaagatgtccagacactctttgatagactcctcatgtaatacaaacaacacagagccaagtcgcatctcaccttctagaaacattcaagggtcaccgcttcaaaatttagttgatctcttctgaaaaacaaacagaaaacaaataaacctgaaattctagaatctaaaaaacaagttctgctaccattttaacttgtaatgggtcaatgtatttgttgggttatggctagctgctgaaaccagtttcaaatttccaaggcttaacacagtagaagcgcattttcaagcatgcaaccgatcaatgttggtgttcatggttcgcatgtggctcgcttgacttcaggaggtgtttcaaaattccaagttacttctagtttatggctccatcattcacttccccagagttctccatttctagcaagaaaatgagaaaaagagacagcagagcagacatatgggttccataaaacctctccttgcatgtgacttaggtcatatctgctcaagttttattggccagagctcatcactgggatgttcctgcatggaaggccaggaaacggagccctgctggccagatgccactgcgtagactgggaaggaaaatgttagtggatagtacaccttctgccgttactgccaaatacacactggtgtggtttggttaatcaacttctgttcagcaaagcatttccattttgaaagcaaggacaaaatacccatgtctagaaaccacccataagatttagttcagttcttttcttttcagcagtagaaaaaaatgtaagaagtggacatgtgacaagtttgatagactggagaaaatctaaaaaggccattattcaaatatttatggatccttttagctaatggattcaaatttataatgctgcacttgtcaacaagataattttgcaaaaacattaaaggctgagcagttcggtcccttctaaccctgaggcctcttcgccacagcaaatgagcagctgttctcaatgaaaatagagctcccgtgctcactgtgttctgagacccaatgcacgttgtgtgccagtttctaagctgtgctttggagaggaatttggcatgttatgagatgtccaggactaggctaaggcatccattttatcaaaagaagaaaaaaggccacatggtgttgccacaaatatcttggacaataaggtagattattgtagtcggaattgaatagtaaaccactattcatgatataagacactgactcttatcccccagggcatccagggtgatattaaaaaggatctgacatgatttttggtatctttgtattaaaaaagaggaagaatgctatgttataggtagtaatggttatggagcaacaaataatagggttaaacagtatttgtggaaaaatagcccttgtagagaggttctgtaagtaagcacatatgtttggaaatagtttatatttggactaaataaactgtattgaatgaatagattttaatgccgttatctcagtgagcataatattgtcaaatacaaagctaaaaaagggaggagactttttagttgtactctgatcatcaccagagagaataagaaattatggtgaagttttggaaagagtttgttaaaagaacacacaataaaatttcatgtttattgcacacaatagaagtgtttgtatgttcagggcccttgagtctttagaaatattctgaagctcaaactacagagcttcccagatacagttctccatattggttttcattttaggaacaatcagtataaataacccaagttctgggagatccgtattgactggctggttctgcctgccagcactatgagcaaaacctgtgctgagagatgccatctcctggtgctttccgtaagcagacctgggttgctagagaatgcagttgtaatgaaaagttctccattccccttattacttaagagagtgtgataccaaaatgtacctaggaagagtgctcactttggagtcaaactacctgaatgcatccttctgtctctgtctgaccgtatggccatgaacaaactatttcatctcttcccaccctcagttcttaaaaaaaaatactgagatatctccttcttttctgaagaatacaaaagacaaaatgagttcttattaatcaatagtgaaaaactcaacatccaaaaaacagggaatattattaagtaaatcagtgtatattcatttgatgggatattttacaaccattattagaagagttttaataatctttggaaattttaataattttattacaatattaaattaaaaaacaaaataaaacattgcacagccaccatgaatataattacacaaaaatgttacacgtagggaagattctgattctggaggactcctggttaatagggcaaattcagctgatgtatgaaatttcctggtcctgtttcaacatagaaatcctggaaaattatatatttaaatacatagctaagcttgaaggggaaatccttagaagtctcaaacaaagtgtttattcaatgctggaggttaatgtctctgtgggaatggaagaataaagcctcaagtttgtatggtgggtgggagctggaaataagcttcctccataaagtcagaaaccagcaatcagtgaaaggagagctcaaaaaactctcctgccttccagggccatggtaaagaagctttaaagaagcttatttattagttgccctgtgaaagaatccaaaatgagaactcaaaatcccaaccctgcatcacatcatgcatggatgtagggtccttggtcacactatttattgaatgtgaaacatggaaaccacaaattaacctagaactggtctgaactggaagaagccattaggttccagcagaggaacatgtaaatcagccctcaaggaggtgttcctaatcaaaggaattccctgaactcactgccaagtgagtttagagtcagaaattacaattcccacaaggaagtaaacaaccatgagagagaaagcctataaaaagtgacagaatttgtttcctaaataactacagttaataaaacaatctaaaagagactttaacacactatggtaaaatatccaaagtgatggagccacatatatgttttataatggaagtttatgaaaaaagaatgaatatagttgaaagaaaaaaaacctaacagaaattctagcaataatacatgactaagtaaagtcattgttttagttatttagtgctgtgtaacaaattaccccaaaacttagtggcttaaaaaattcaaacatttatcatcttgtggtttctctgggccaagaacttgcaagcagcttagctgagagaatccagcccaagttcacataaagttatagtcaagatctgagccagggctgcatcttggaaagctcttcttccaagatgactcacttgcatggctggaaaggttctggttgtttgagacaggcttaggcctaagttccttctcacacaggcctgtcctcaagctgcttgatgcccccacagtatggtggcctgcttctcttagaatgcacaatccagatgagtaaggcagaagaagtgatgccttttatgactgagcctcagaagtcacacaacatcacttcctcaacttattcattagaatcaaatcactaagccaggcccccattcaagtcaattagaattaggttctgtatttgttgtcgcactgctaccaagtaatacttgagactgggtaatttgtaaagcaaagaggtttaattggctcacagtttatgcaggctgtacgggaagcatagtgacttctgctcagcttccggggaggcctcaggaaacttacaatgatggcagaaggtgaaggggaagcaggcacatcttacatggctggagcaggaggaagagagaatggagggaggtgctacacacttttaaaacaagcaggtctcgtgataactcattcactcactgtcatgagaacagcaccaagggaatggtgctaaaccattcatgagaaatccatccctatgatccagtcatctcccaccaggccccacctccaacatggggattacatttcaagatgagattgggtagagacacagatctaaaccatatcagtctctaccttttaactgaagaatgttaaaggacttgtgaacacttaaaaaccagcagcactactgaaataaaaagatgtttatttgtaatagtaatgcttgtctctggatggagagtaaaatgtgatttatttcactcttttctgttttttcttaaaatttctacagtaaaaaatattttaacatttctaatgagaaataagatatatatgtgtatatatatgtatatgtgtatatatatgtatatgtgtatatatatgtatatgtgtgtatatgtatatgtatatgtatatgtatatgtatatgtatggaaactatccattaaggggcagaagtatggacagtttggggtacgtactctgtgccaggcaatgcttgaaggtattcatttatttaatcactaccatgataactctatgaggtagacactatttttatccctatttctaaaggagaaataagtacaattggtaaataagcctgggaaagagccatgattctatctacatctggagacttatgcatacaattttctcatacactgaggcttataaaacatctcacagaattcaatgaagtacccaatatgtaatgatgtcacctaattctgcttgctattttcataagactgcttcctgtctttgccttttggaataataaagtactcaggtgtactattgggatggtattaattaccatcaacccaacatgaagaagtcttagcattgcccaaaaggcatttaagaaagcttaacacgtttataagggctccctggctgggtccaatctttcagagattaaacatattaaaattcacaaaaggatttgtaattatttatttttctaaacaggcagaagaattaaaaaaacaacaatgctgcgttagataggagtctctttacctcttgttatgttcactaccaaaatgaagtgtccttgttttccttttctctgcgtctaatctcaatgccatttgattggcatttaattttcacctgaggattagacagaaaactgagataaatcacttgctcattcaacatacacttcctaagtttctactatgtgcctggcattgtgctaggaactggatttacagagaaaatcagacaaatacagtaccttgtctcatggaatttagaatcaggtaaaatattaataaaggcaattaattagtagaataaatgtgaataagcaagacaacactctgctacacagaccatccagaatacaccagatatactgtattgcaggctaagaagaatgctatttgacttttaagcaagttggcatttcaaaactaaatatttggagtaaaattttaccccctctttttatgctattttgtttgtgggttttaggaactgcattccctttgtgcttctttcatgatgactagaagacattcttactggcatgtgagaaccttatattctactaagagcaggattcacaatattacatatagtacaatctaaaagccgtgcaaaaagtgcacacacaaaggccatttaggaacacaccaaaatatttaaaattgttattttggggtgacactatttgtcatgctttaaattttttttcttctccattgttttctgtgttttaaaaatgtttttaacgaaccctatacattttgccttcttttttataaaaataattgcattgttagatagatgcaaagtgacacggttgtggttctaccttttgaataaaaattttggttggagaacaaatgcatgttctaaggatgatttccaactttcatccctgatcccagggcattggacatgacagaatcaatggcatattgcacattgcactgaattttaacatagaagagaagttgggccaatgcaaaggtgattgcagaggggtaagagagaatgagaggatctgagagagaatggttcaatgtttgacatattgaaagaccatcgtgtgagttcagagagtggtcatgatatggggagaagtttggagagggagcttaataaataagtaatggccactgagggtttagatagtttcatatttaaagagatatttatgaactattgcaagacttgtagtggctctccacttttctcttcccctctcattacagtcgaagggaagaaatgaggtctaaagaaaactgcagacatacttagagccacagacgacctgttcattaaaagtgaatgtaagagttagcacaagtttatactgaaaattttatttttatctcttcctctgataactgcttctgaaaagtatccaaaatgggtgcagctaaatgcaatacctcctgtcacagagtgcctttgatatagaagttgtgttaggcatttagatgagattccacacacccaaacactaaatccttctctgtttcagcgttccaagttgtttattaaagagacaaggggtaaatgcagcatcctgctactaccatatttgcatgttttgtttcacttttttatttctaaattaaggcttgttgacagccaccctgaagattattgctgtgcacaattattcaatcccactatttctgcattcatgcgttatctgagacatcccagaatgcaatctacaaacatacatgagaatctgggagtgtgcacaaaaacacaaatttgtacacacattgtttgtgtgagatgagattatattgccgaatattaagaatataatgtcaaagtgaaagagaaccagcttcacttaaattctcctttccttactagttctgtcatattgtgcaaggaacttatcctcaacaagcctcagtttccccacccatagaatgcaaatagtgattacttccacatcgaattgttgtcaggaataaattagataagtgatatggtttggctatgtccccacccatatctcatcttgaattgtagttcctataatccccatgtgtcatgggtgggacccagtgggaggtaattgaatcatgggagtggtttcccccatgctgttctcgtgatagtgagtgagttctcatgagagctgatggttttataagcgtctggcatttctcctgctggcactcattctctctcctgccaccctgtgaagaggtgccttccaccacaattataagtttcctgaggcctccccagccctgtggaactatgagtcaattaaacctcttttctttataaattacccagtctctggtatttcttcatagcagcatgagaatggactaatacaataggctatgtaaataatctggaattttacctggcacacagtaaacattcaataaatttgtctattattacaattgactttatgtaaatatacatcaacacaaacaaatgttgatgattatgaaaatagtagtatgatctgcattttaagtgtattctgttatatctgcattctgattcccaaacaagtagattgcttatcattatttatcatgaattctctccccacattgctttgaacccattttataggatgagaatggtcttttccatttccctgtcacatgattcagactccatgatggggaaggcaagtggagtccaggatgaagatgactctttgttatatttgacaacctttcttcatttccttaagaagggaaggatttacttaaaacaggtgtgcaagcatccatctctgccccagcctatcacggtggatgcagccgtaatccctcttcctgggcgttggagacacttgtatttcatgatcagttatctgcagacaggtgtcttagaaaagtgccttggcttgaaattgtctgttccatcatcctgtccatggaatggtacacaaaacgattgttgaaggggcacacacacttttctttaagtaaattaggttttctttgaaaggtgttctcagtcttccccatgacaggtgtgactcccgaaagacataaagtcctcagagataagtaggttcattcaatgataaatgtgcttcaccctctgagcatctgctggaccacctgtgggtgacatttccttgagtccaagtttggcagaatgaagaatatcagtgccctccatgcccactccaccaccccaccatatcaatgtcccaggcttgctaaggattaggtggtactgcattgggaaaatcaggacatctttcttgcaatgataattttaaaggcaaattgtttcatctacagaatctgataatgataaaatatgacttgaacccctggagagatttctaggccaaatcaacttccactgacagtcaactatagctctcaatctatttgcagactcagttcaatacatgcagttatactgaaaagctcacttacaacttagggaagtcttatcaggggcaaggatgctattatgggtcccaaatttcaatttagacactttgacatttttgctagaattgtatgaaaattttcacttactgcatacatgtaaatgggcaagaagacaagagctcaagcaatgacaggaataatttggtgaacaaaagttcttagaaggaagactttgacatcagacagaaatgtgtggaattaggacaaggtgaaataagtgaacaaagtgatttcactataagttgaaaggggtaaggaggaggtgatattcaggagtaggatactaatgggtgtaaattataagagagagcatttattggtcgctttcaatgtgctatattctgtgctaagtgcttatacatacctgatcttgtttaataatcacaaggccctatgacagaaacagcatagcgtaatggttggagcacaagctctaaggcagcctaagtttgcatcctgacattacaacttactagctgcatcagcctcaaaaatctgttaaatctgttaacatctctaaactttggtttttgcttgtaaaaaaatagtgtctgcacctcacagagattttgaaaagattatataaaacaatgccgaaaaagaaaccacgtatcttggcttacaataaattctccatattgtaaatgctaactttgtcatgaaatcattatcacaattttacatttgaagaaactgaagcttggggaagttaagtaacttgtttaaggctgcacagctaataagtggcggagccagggcttgaacccggacctgtgtcatgctaaagcctacatatttaatcccatgtaactaagggctgaaggtacagaaggaaggtatgattagttctttgcttctgtatcttaaaacttgccagcctgaatgaatgtgcttccatcaatcaatgggttaatagatagataaaaagactaacaacaaatgcaataaatctcacattaagttttgagattttaacatttaggttatccttattggtagtcctgtaacagattctgttttctttgacatcaataccaggttgatttgcaaactctgaaaggcatgattagtataatgtgattctacaacttgaggaataaaaacagccacacctcttttattagttccacttaattactcgagctcccataaacactcataagcggaaatgttaatatatttctcttgccatttttccctgacctcatgcccagctctcatgcccacatggattggtcctgaatctcaggggttgcattcattttgtagagtcacctttgcttcaaaagctggtcagagggagaattggtgggttgagaggtctggaaactgactgcaggtcccagctgctgctgtttctggtgcttccacccagtgtcactgttgagaacgggtcgcatgcagcctctgctgctttgcccaccccatcaaggatgccttttgctgcttaaatcctagctcccaccagagtggtagcttaaacgtaaaatccaatagtttaagccccactaggttttacttgtgtgctcaacaatttctggaaagtatgccattctgtgttggaatggcaggatctaaagtctctccagccctagtcacatgggatatgtcctagacaggtctctccaacagatctttagggactgatgttgactctggatcacctactgaaatgctctttggggcctgtcaagagaacttacatgggaatacctcagtcagagatggtctaataataatgagcctcaaaaggaaataagtcaggaaccatttctttgcatcaggctccctgtgccctatgtaaattgaccatctcttgagcaatgcccaactctgatggccactacagatcaaactcctgcaatatcttcttgaggcaaatgagtacctgttggacttcttttgtgtggctaaacagtgctcctcccggcagttcgtttaccacctagccccctctagctcatgtggttgcctctctagcttcctcaaacacaatcccagacctttccagatgccatcgcctgtgcacaaccccaggattattagtttgaacaaactatgatgtttctgaggatattttcctctggttatttcttggctaaaacagtgtacccttgccacatggctggaatactcctcccagctcttagcgtacatcggggcctctcaactgtggcactactggcgtttgggtctgggtaattctctgtggtgagggctgtcttgtacactgtaggatgtttagcagcctcccagggtgaagaaagtccacaaatattcctctgtgtcttcataggcagagtcactgctagtagcttctcaggcaggaaaaataaaggcatccccatgctgtcactttttttatgtgactattcatattttccaaaccaaaagtcaaggtccagagtgtgacaaatgggacttaatctctgaaaccgttgagtactgaaatcagagctgcttagtcataagaaagagtgtttttcaagtccatgtgacccatcactgatagcataacaggaaggaatagtggccttgtgcctttcttccccaaagccatttgttcatgagactggatccaagaaactcatttctgatgaggcataattgagagttgcccttatagtggattgttagaggctgaagcatttattcaaatgctatttattcaaataaaatgtatagttgcctctactcccatgctgcttttaatctagatactgagtagaaaaacaaataaaacaaaccctgcaccacacagtgtatgaaatgcacagggcgccacagcagggcataagggaagaatggttagagtaatcagggcaggcctcactgaggatgggacattgaagttgaagatagtgaagagatagttagatcagcggttctcagctgagggtgattttacccactacaggacccttggcaatgtctggagacactttgcgttgtcacactgaaaggtaagggaggtgcctctggcatctagtgagtacagcccagggatgctgttaaacatcctacaatatagaggacagcttccaccacagaaatgacccaggcccaaatatcgatagtgccacagttgggagactctgatgtaggctaagagctgggaggagtattccagccatgtgacaagaataggctgtttagccaagaaatagccagacggaaatattatcagaaaaagtacaattttttttcaaactgataatcctgaggttgtctttgaagagaggtgaagttaagtttcccaaagcaagagagacaattgcatggaccttgaaaccctaagtggtgaaagaaaggagtgaagcaaccaggtgtgtgcaagagaaatcgtgttaaaactgaagagagtcaccagctctgaggttctgcctgtcatgactgtgaagaaaggtctatttagagttgctaaacactctaagtcttaaagaaaacttgcatcttgaaattttacatcttggcaaatcctttattttaatcgcttttaacactgtgcaggctaagaaaagaaaaaaatatttgcagatgaaattttggcccgcagagattaaatttgcaacatctgggtcaaagacacaggggactgaccgacttcctcatctataaagagaggtgcttggacaatgtgctttctcaagtcttttccaattccacaccccatgactgtggaaaagcagaacatccaggtagttgacatgccacatttttatgatagggaggtcctttccttccaccccagatctttcactctatgtttctctacatcttcgaaacccaagcaatagtcaagtcctaatcgtgccatcagcaggactcacttaaacaagatggaagagaaagacaaaaattctccttaatcccagttgatatgtgactttgcttagcactttgaatattattaagtgtttgaatttcttcctgtgtctttttcaccgagatgactgtctttctgtttcgttgacagcctctgcaggaccaaattgacagctctttaaaggcggctgacgaaaagcagcattaattaagtcattgccggactgtaattgtgttaagaagtaaaaatctaatacgagaaaaggttagtgagtcctctcttgtgtcagattttctactccctatgaatattaatgtccttaatgaagacaatctttgccccatcaagccgttgttctgcattcaggtgccaaatgcctgtgccattgatttgtttttaaagaacaaatatgtcaggagagagtgactgtcctgtttcttatcaacatcatagaggatgcttttgtattcccaggaagagtttatagattttgtgtgcatgtacaagctcttgtgaagggaggggggagaaagtcatgtgcaggcagggtaaatgagttatggtaatttaatattagtgttgtgtttgatctcattagctccttttctgtgtgtgtgagcaatattcatatataagtggggttacaatcagcagttttaataaaataggaattctctccagaaaaagagaggcctgcggtttaagcattgaaatggggtccatgagagaatcaaattctcctctgctgatggtcctcttcttactctgatggagctgatgaagaatgggtcttaaataggttggaggccttgttctctttctctctctatctcagtatttactcctacctcctacaatcaaagacaaaatctcacctctcttcttccgaattcttgaccaaaaatgaagtaaccctacatatatattatatatatttacatatgtatgcatgtattatatatacatgtatacatacaaatatatacatatatacaaatatatgtatatttatatatacatatatttgtacatatatatctatatgtatgtatgtataatccaagttatacaggtatgtatgtataactgaagttatatatgtatgtatatacataatacatatatatttatatatgtatgtataacccaagttatacaagtatgtatgtataacccaagttatacaagtatgtatgtataacccaagttatacaagtatgtacgtataacccaagttatacatgtatgtacatatacatatatgtaccaagttatacatatatacatatatatgtgtgtgtatacatacatacacacacatacatataacttgggtttctgtgttccagaaagtccaaagtaccctgcttctggacataaagtcaccattgtcaattttttggttggtgagagcttgatggtgagtcagtaagctgaattatgtgccaatttacataactgatttagttagaattaatttgggctgaagtaacagggcaactccagaagtgtagcttcatcatgagagccattgcttcatacataagtcctagctggtgtggttgttctgtgatggtcaaaggctccaggctccctccaactttccactcatcatctctaatgtggctcttgtcctcattggccaagatggttgttggggctccagccatcacattcaccctcagagcagtaagtggcagcctcacatctcaaaggaaggaaggaggccaaaaaatttactgccaaaacacatgtgctagatgattcacctatattattttattttattgttatgtccctatatgatgtgtcactatctaggttagtttactattgctatataaaagctaacacatgcttagtagcttaaaaaaacacaaacattatctcacaattcccatgagtcaggagtcagggtatggattagctagtcctctgcttggggcctcccgaggctgaaaacaagtattggtggaggctatgattctcatctgaatctctggtctgcttccacactcattggttatttacttattttagagacagggtctcactttgtcacctggctggagtgcagtggcttgatcacagctcattgcagtcttggactcctgggctcaagcaatgccccccacctcagcctcctgagtaactaggactacaggcatttgccaccacacctggctacattttttttttttttttttttttggtagagacaggtcttgctctgtttcccaggctgttcttgaacacctggtctcaagctatcctcctgccttgccctcccaaagtgctgggattacaggtgtaagccaccatacttggcctctcgctggtgtttgacatagttcatttgcttgtggatgtatgattgacacccttttttatgctagctgtcagccagagactgttgttaccttctagaggtcacatacagtttctagtcatgtggccctagaagcagctcatagcacatcagtgtgctttctcccctaggccagcaggagctcatccctctgatgttccatctccttttttttttttttttttttttttttgcgacggattcttgctctgtcacccaggctggagcagtggtgcaatctctgctcactgcaacctctacctcctgggttcaagcgattctcctgcctcagcctcctgagtagctgggattataggcgtgcaccaccacaccaggccaatttttgtattttttagtagagacggggtttcaccaagttggccagtctaatctccaactcctgacctcaagtgatccacccgcctcggcctcccaaagtgctgggattacaggcctgagccaccttgcccagccggtccatcttcttttaaaggcttctctgattaggtcagaggcccacccagatcatttttcttttgaataacttcaagtcaactgattagtaacccaattataagagtgacatcccatcatattcacaggtttcgtccacactatacaggaggagactacacacgctgttgaacgccagagggagagggtcttgggggcgtcttagaatcctgcctgagactgagaaactacccaggtttgtcagtgtagaagtcaaagagagtatccatgtgtttctgactcaaatttctaccagaagtcctgccattcattgtcaacattcctaaagaggttagccatgcccttggttttgcacaatgtcgtttaatcaagggtctattagatgtaaaatattcattagtttattcaagaagtatttagtgagggttttctgtatgctaagaactggataggagagattctgacatgaggcagaatggaaacctggagccggatggccagagtttgaagtgtgcctctgccaaaagttagggatgtgacctcctgcaactcacctaacctcagttttctcatctttaaaatgggtatgctagcagtgggacttagttcagagagttgttgcgatctatggtactcaatcaacatttgtcattattatgaaacatttgcgcccatattgtctgttttcaattgcaaacttttggaaatcatgggtagagtgtggaagctttttgttgtactatcaagtcttccatcaaacacccagacatatcagaaaattaattactatggaagatgctgacagcacatttctgccatgaggcagatttcccccgtcttaacatgcacgctggggcatttggaataaagagggaaaaaaaggcacattttactagttctctccaaacacagtacagactgctaggctgtttcttcagagggggagaatcaaattggctccagatccctgctaggctgccagaccgtgggaagtgagagagaatgtcaaagctggcagttgacaaacaaggagatcgttccaaaaggaggaggattggcctaaacaatatccttcacaaatgtttttctcagcttttgatagagaaggagaaagggggaaaaaatcccacaaatcctcataagatattctagagcactggggtcactatttgcaaaggtttcaagtctgggaacgtaccagctttaagtgtgtaggaaaattgcaagttatagatgtaactaaagtacgttccttctaaaaagaaatgaacaatatgaatagtagtaaaggcccctttgataccatcctcactttagttctccttccttcccctaaggaaaccagttatgaggtttgaaatatagcctgtgatttaattcaaataattaaattgcatctatgttctattccctgagaaaatgtatatcgttgttttgttatttttacacaaaatgtgtagagttgcttcctgttctttttacttttatataaaaatattatgatgcacaaccattctgcaatttgctttttcccttcaaccgtgtttctaaggtccctcctgttgatattcatcttgctcattccttttaaacagctaaatatcctacaattaatttctctagtctcatgttgagggcataggttgtttcaaactttttggtataaatggtgctgcagtacacgtctgtcttgaaaaatatgacaatcctactttgtctactacgcttcacattggtcacatggcagcagggtattgtctcttagagttccctgttgtttttattttagtttatttgttggtcagttggtagaagactcattcattcgctcaactgtgacccgctcaccatatgtcagtcactttgccaggtattggggaaatcagatcaaatcaactaagacattcacgctagccctgatcaagcagctgaagtgataaattctgtgacagagatgtgttcaagggatgctggtggcacacagtaggacgtctcccccagatgtagtgatggagagttggagaaagctccctggaaaggagttgtcaatttgattccactcgtttgaattgtttttcaaaaagcacaggcttttccttccaaccttagtaaagacagtttgtggaagataatgtgatcttgtatgaaggctacgactcacatcactaagggtattcttatttaacggtgagaaggtgataagccataaggagaagactaatgaattgtgaatgcctgttgacccaggatgtgtcttggaaattttaaaggatagagtatatgaatgtgtgtatatatagatgtgtgtgtatttaaggcaggaagaaatctgctgctcctagttaatctagtgactctgttagctaggtttacagtcattgaggtttcaaattggaatttttataattaaaagtcatttttggttttcagctccaaatttcctgtcataaccctagggcctcactttatctccaccacgttctaagcctgtactgtcagtttctcttccttaattacttctgattcttagatctcggattgtgtgttttcctctgagactgccagtaggcctgccccacacaacggcagaaggaaaggtcaagttaagtcaagggcctggcatgcatgcaagtggggaaggtcgaaatatcttaggaataaggcgtcttcccatcgtcattgttattcttgaaaccttctccaaagtctggcaagtttcagcatcacatgtgctcaaacccccatgcattaacatgacaggatttcctaaatgagaacatatcagaaatggatctgtgatttgaaatttctttccctattttgaaagggcttcagtgatttcttacatttgtgaacttcctttaaaaaaaggaaaaacgtgtttttatgggaaaaattagagaaaatactttctgtggcgtgtttgtttctgttaaccttagctaaaaagagtggaagtaaaatcaagatgcatgcctctaactacagatttttgaccttttgtttcttttatgttcagaaaagttaattcaaagtaaaccatttgcctttatgagggggtagtcgatatcagaaaagtaatacatcaaaatgtaaatatctacattttatgcatgcaagtaagaaagccaggatgagtgagaatttgtttttgaaatagaaggtctattatatattaaattgactatggggtgcctactactctccagttacatttcgattggtactgcttttagatgggtgaacactaaaataatatttgagtaggtgtccatttagataaaaaacacacactcttcaaggagaacattgaaatgtattatactcaggggatctttttaacttcccccttttaaatgtaaagtgaggatttccatttccagaaagatcgagtatacataatttttcctatttctcccactaactattaaaaatctggacattataaatatgtacacatatgtatgtgcacatattttatatgtgtatgtgtatgtattatatatatgtatatttatgtattacatatgtgtattacatatatatgcatgtgcatgtattatatatgtgcacgtgtatgtttttatacatatgtgtatgtattatgtatgtgtatgtattatatgtgtattatatatgtatgtgtatatattatatatgtgcatgcattatacacatgtgtgtatgtattatatgtgcatgtgtattaaacatgtatgtgtatgtattatatatgcatgtgcatgtattatatatgtatgtgcatgtattatatatgcatgtgcatgtattatatatgtatgtgcatgtattatatatgcatatttatgtatttcatatgtatatgcacatattatatgtgcatgtattatatattcatgtgtatgtattagatatgtatgtgtacgtattacatatgtgtatgtattatatatatgcatgtgtatgtattgtatatgtatatgggcatgtgttttacatatatgtatgtatatgtaatatatatatatgtatatgtatatatctctcaaactaaaaggtggagagaagaggatagattggctagggttattgagactcaaagaattacatggtggtgagttctctgggttttctctgtgctgcatacatgccagacttggagctgaagaagccacacaccaacaggttaaaaaaaaagccgtaacaaaaacctgttatttctaaccaaggggcccggaaaggggcagcctagtaagacagaaaacttttcaataataaacacattctactttagccaaacaacatagaaaaaaaaatatatggcccgaacctaatcatgcaagccaaggtcaactggaaagccaagatttccccattcatgagacttgcagtgaggcaccccagtgcctccacttggctggtgtcagagaggccaggggagcattcaaacttcaccattgtcccaaagtaacaagtccatcccctcccctggagtgtccgtgcaggccatgagggagcaataacaaggtgcttctatcccttctagccagggaggtgtcaggcgcggcctaagggaaatctagaaccacccccacctagcattagttagggatcccagagcccccctttctgctgtcatcagaggctgagtagggagcctggacttctattatacttgggacaggagggaagtgatgatgaaagggcagcatgaaggatccttgtgatgttggaaatgttctgtgtttgtatcaatggcattgtcctggtagtggcatcgccctatagtttggccacatgctaccaccaggagacactgggtcaaggatcgctctgtgttattgtttgacaactgcatgtgagtctacaatgatctcaaaatacaaagtttaacataaaaagtgaaaaatggaaaaaaataaacatgctgtcttctgttcttcattcactatttttacattcatttattcataaaagtatttagcaaggacttcctgggcaccaggcagtgaggatcctaaaatgtctacttttagttcttgccctcaaagatttattaatctttcaagaggacaccaatatgtaaaacaacaagaaataagtaaaaatccttcttaaaataaaaatggatcatttgaaggctctatattttatcaccctcctcaagtggtaatggtcaaatggcaaaaacaaaaaaaaaatctttataaaatacattaggactttcatgaattcctatccagtataactcaaggaatttgctcagcaagaaatatcatcccaccagtcagaaggcaagatctatatatacgatggataattggaacatatttatgtcttgcatttctagctccttaaaatctaccataagtatcatcatccttttccatcttacaatggtttaaataaataacatatgttcaaggtcttagactgcattggcttaactctcaaagtaccacttctgtttctctctgttctaatccaaactgttaaagccattcactttgtatcttgatcatcactctgtccccaacaatgtcagtctatgatgggcagtccctacagctcaggcaaggtttcaaaacctccccagtgtgactccaaggtaagaccacgtttggtggaaagaaacctgcaaacactgagaaggaaagcctggtttcatcttatttttgtcttctcttcccattgcttcagctttacttccacagcctcacagaaaatccttccttgaaaaccagtggtctctcctctcatgtgtgaactctttttacagtggtttttgagtgtgcatcattgccagatttaatgcaatgtagaccaatgtttccccaattcagttttgtatacaggtgacagtctgtgacaaagtttttgttaatacaaatattcattgaaataaaggaaacacagcacacattttacaaggcaaacacatttagtttaaatgatggtcttttatctagatgttattttttttctattttgttaagtgacttttctatgtaaaggtatttattatggatggtagttacattttgctttttaatgatctttgcaaaatgaaaagttgatgaccctatgattgtctatgcctctcttttctgcaacatatctatggttgaaaacaattatcaaaaatattggagactacaaatatacattttttaaaaggcaagcaaatcttgcctcgtgacagaatgaatcttctgaagttccatggaaaactaagaaatgctcacatattctttgagagtcacaaagcacatttgcatttttataggctctgggaattactactgaaaagacatttttaactttgtgtactatggaatattcttaatttgctcaatcatagaattcttatattttctacattatatatttattccatagtgcacattttgggaaatgctgtcataaatgaagtatgatatatttgagtggagaaaactgtgggagaaagaaatcttggtaagatctatcagacaaacatttatggaagcaatgcatttggggcaagattatttgaaagttacaaggatttgatttggctccagaaagaggccaaagataaagatcaaattaatctatacaagaggctgcaagtagagatggcaacgcatcccaggcagctgacctaaatgtgtgaaatgggcaaggataaggtattggggaatggtggggagtgtgggaaactctaagtacatgccctgctgcttgtctcgactggactgtcatcatttaagaaggcacgcatgatggaggtgtcataacttttggattttgaagagaagacagagatccaaatttttccatgaaagatttctctatttttattttttaatttgtatgtatttatttatttttttttgacacagggtctcgctctgccaccctagctgtcactctggcaaaatcacagctcaccgtagccttaacctcccagtctcaggcaatcctcctaccttagcttcctgagtagctgggaccacaggcactcaccaccatgccagactattttgtttttactttgattttttttttttttaagatgaagtttcactctcgttgcccaggctggagtgcagtggcatgatcttggctcactccaacctccgccttctgggttcaagtgattctcctgcctcagcctcccgagtagctgggactacaggcacctgccaccatgcccagctaatttttgtatttttagtagagacggggtttcaccatcttggccaggctggtctcgaactcctgacctcatgatccacctgcctcggcctcccgaagtgctggaattacaggcatgaggcaccgcacctggcctgtttttactttaattttttaggagacagggtctcaccatgttgcccatgctggactcaaactcctgggctcaagtgatcctcctggcttagcttctcaaagtgctggtatcacagagatgagccaccatacccagccaatttctctatttttaaatattcacaattcaaagctaaaaccaaaatgtgaacctaatatatatgtatacatatctattatagatgtatatatgtatgtacccatatgcgtatgcatgtaagtatgtgcatatatacttatgtatgtgtgtacatataatatatatacacacgtgtgtgtattttatatatatattttatatatatacacacgtgtgtacatattttttatatatgtatgcacacacatatatatatatttgtaggtgtctcgtttgcaacctagactaaaatttttgtaattttgtgaaatttatttcacatataacaataaaatatactatatcaaaaattataataatattgggagtataaagcaaagtaaccatgaatgtttagtctcaagatccagttagaccaagatggcattgttctgaattttcattcccaagaggacatattcctgctgttccctttttcattgagaagactgaatgcacctgcctgctgcattctcttcttctatttctccctttttgttctcccctcctggatcctcttggcaaagaagggcacccatgtgtgcacctgattcttgtactgcatcttgctgtgtaccagctataggcaaaaaggcagatttagttcagccatcatgaagagcagagagagaattcagaagtttcttatcacatctgatctatgaatgatgtgggaattatagcactcagactgcatttgtgcctgaaaatgttaaaaaaaaatcacaacaagaactcctcaactccaaagagggcacagaactctcaacctcaaattaaatttcacaactttaaaaagcttgtctcatagtagaaaaaattactctctataatgttactaggaattataatactctcatctttgattggcacccatatcccaatggatgcaaacatacacagggtgatttgaattgaaaagttggctactaaaatcacagattgctacacattcatttgtgagagcaactccttccaacacctaaaagttaccatagaaagaagaggaggtggtggctcatgcctgtaatcccagcactttgggaggctgtggaagaaggatcacttgatcccaggagtttaagaccagcctgggcaacatagggagaccccccgtctctacacataataataataataataataataataataataataataataataaaattagctgagcatggtggcgtatgcctatgtcccaactacttggcagcctgaggtggaagaatcacttgagcccaggagctcgaggctgcagcaagccgtgatggcaccattgcactgcagcctgggcaacagagcaagactatcttcaaaaaaagaaaaaagaaaagaaagaaggaagaggagattttcagtttacgtcagtacttctttactgagggtgattttgctcatcctcatgtcccctgccccttacatttgtcagatatgttttggttggagaagtacgtgctctggtgtctattgtgtagtgaccagagatgctgctaaccatcaatcatacaatgcacaaggcagtccccacaacgaagacttctctgaccccaaatgttcatggtgccatcatggagaagctgtggtatgtgccaagctaaagaaatgctgctttgcattagcatatcacacatgctgaggtttcctgcaaagctggcaaagggggtgatttccttgtacatcgctccttgccaaattgggtgacatcttacagaaccactgctgcttttcagggtggaaacaatcttaatctaagtaccttgcagggcattcatatggtggattacaatgtgtagctactacctgggccaacactttgtatttctgcttctcggtgtatgtgggaaccaatggtgtcctctcaaaggacaactatgtgttctgaattcatctttgaagagattttaaaaagttgtcaccaacacctaataccttacagtggctgcttctccagttatttctggagtctactgtcaaacacaggttgaaggaaacagcaatgagaaaggcagacaaatgtggtcctcacccttgtgggtcttatggtttagaccacaggtcaacaagctttttctgtaaagggctagatagtaagtattttagacttgtgtaccatagagtctcatagtaacaactcctccgctctgccactgtagcacaaaagcagacataggtaatatgtaagccaatgagtgtggctgtgttctaataaaactttattcataagaaacaagtcactagctagatatgtcccatgagttggagcttcctgatcgctggtctagattagtgaggcagactttattcagatacatgcttgactaattatattttccaaaccatctgtctggtattctatcccctggctttctgcatgataattcctttgttatattcatatctcagtttaactgtcaccttcttgaagagctcctccctcaccacctatgaaaaatggatcaaaaattgtcccgtaatgtacatcctgcattatgagctacgtgttcacatatttgttcaatctttctttttaaataaaagcagagaccctgtttgtctttacacctcttggaaccttggcacatagcaggattccccccaacccaccatcacccacaaccgtcacacttgcaggctataaaggaaacttacaagaacattctcaatagtgagacctaactggtcctggagaggatcaagttttatacttgatactaaaaactatcactgaaggaactactaagtctagtatctaacaggaattgaaaagtattatgcaccaggcaatgttctaaccatttttgagtattaacaattttatgaagagtcaatattatcattcattttatagataagaaaagaactcataaataacttgcataaggttactagtaagtctgggattagaacccataaagtctaattcttgctcttaaacactataatatgctgtctctactatagccccccaccaaaaaagttaaaaagttaaaatcccttaaccaaaaaccaaaaacctgactatcctgaaaaggtgacattgtcctagtgtatcagagagataacctagcaaaaccagtcaattttcaaaatgtgaaatttccacctttggattgattttgggaaattaaaattctgaacctacaaaagcctagggtgaaattgtgtatgctagtcttcaagctatctggagggggttgacatccttctgcatggggctgctttctgcagcagggagaccagcccaacactctgcaggactgtaatggcgaccttccagtgtggaatgaatccattgagaatacagctttatggggccatgcaacaaatgcatcaaatatttattgccaagaagtatttattgccaattacatgaatgtgaaacaagacatcatccctggcctacagagctattaagcaaggagatgggtgaatgtgaggctgccttgagatgcgggaagggaaatgcaaaagaaggggatgattccggggtttccaggtggaacagggactggtgcatttgtgtcagcatgtatggcagacaggcgccagattatgactttgtgagtgacacatggctttaggagaaagtgccagtcctaaagtgccatctggacgagccctaacatggtcatgtgtaatctgaatatgcatcatctaataatgactgagtgcttacttggcactagacaccactctaaatgtttgaacatatcatctcactgtgttctcacaacaaaccccttaggcagctaccatttttattctcattttctacatgagaaaactaaggtgtataggggttacgtgatttttccaaagtcgcatgggagaccaatgaatagaacctaggcagattgggctccaggatccattctggtagccactgttgccagcagtcataacctggctctatctccattttctagatggagaaaacaaggcttaaggaagtgcagtgacttctctgagatttgaacctgaatttgagctcacggtctttttactactctaagatagtagttgtggccccaaatccactttacctaatatccctttatgagaccttcaaaacaattaccactctaaaaagaggtaatgaaaactgatctgggtttcttgggcctgagaaggggcaggaagcagatgtgagagatagatccaaaaagacttaaagactacctggctattaagacataggaaagagaaaaaattatgttaattatgttggtgggtgcctagaatcttggaaatgccatattgcagagataaagaagacaaaaggaatagcttggagaattaaggcaattatattactgctattatccatcataaataatgtcaagcaggcatttccctcccaagaattatctactaaattctgggaggtttaccctctcccagtcacacatcaactctgatattttaaatccaaagacataatatttgatcacacaccctaaccttttgtcatgaagacatacactctaaattttaaaagccttcttccagaaatatttaaagctaaccattccattaaataagtcccggatatccagacagtatgactgggataatatggaattatttataaagatggcttgttctgagaaaattgttatgctgaagagagggaaatcccaccttctgtctttgttcatgaactgtgattaaaaccaatttatctgagatgtatcaaagagagataataagtaaagtggatttgggaccacccggttaggtgacaggtcttttggttgctttcatgtgggataccacctccagttacacagcagcacattctcatctcatagctgtggaattcttggatttgaaaccggctctgttcactttgtataactgaagcctcttattttgcgttgcctaattctcgtcctttatttgcatgcaaccttttatcattaaatgatgcttaagtggatcaggatagaatccactttgttctctaaatcaagaactctttttcatatgaccttgaaagtaggagattggatcagtgatgcttcccgctgatcttggaattaacacatgcacatgtatgttcctggtttgccaggtcttagccagtctggcccctgtccacccctctagcttcatcccactcctctctctttttctttccggattcaagcctcagggactccctccatttcctccaaccaataaaattccttcctgcatattctatttgggggactaacatcttctttcttcctgccttaacctgatctgtttcaattcattctgtccatgtcagtctaattgttacttcctcagggaacaacatcctcctccccgaaactgggcaattttctcctgttacatgtcattactccaccaatttcctctcctctagagaactgacagcaattaaaattaaatatgtgtttgtgctattatttatttaatgtttattttttcaaaaggctacaacccctatgggcaagtcatctatggtatctttagagcctagaaaagtgcttggcacatagcagttgctcaataaatcaaagaataaactagtgactaacgaatgagtaaataaatggttagtcagttgcctaatcccattaattatgctctgaggatgctgcagaaaggcaactcaaggtcttcagaactcaaactctgaactctgattcttattctgaggtttacataaaatttctacattattttacgcaagcatttcttcgattgtttttctcaatcttaaaaaaaggtttaatcaaacagttttaaacatattaagatgtttctctgtttcacaaaatctactgattaaaagcatactatgttactgaaaaattagaaatgaaaaattaaaatttgttatggcaacattatccaaagtgtggtttgggagtatgagtttcactggctgttagaggaaaaaaatattccacgatcaagtgcagttgggaaacttaaaaaagcaaaaagattttgtttgtttacttagtgaaggacccctagatccttaagtatgctaatgagcattatgaaaactaaagaggaggatttaaaatgatacgttttctaaatatatgtgaccatagagaatcatctggtcatagaccatcttttggaaatactgctatgtgtagcaaaagataggttaatatttcatgtttatgcctgctttgggagaaagaactgtaatgattttaagaggaactccacttatcccacaaaccaaattttaggaactatgcttccttccttgcattggaaagcaacttccaattaaatgccaactctggtttatggtttaaacatcaataataattgtatcattagaatggagacctggagttctcattgtcacattccacatggagctctcattgggaaaagggaagggcagtcagtttaggagtatttacaaagtagaatccgtattttaaatgacactattgatgggagaatagaaacaaggagaagcgaattcagatctggaaaactaatcagattctaagacagagcctcaaaactggacagtcaaaagaaacttgcagaggttagcttctaggaggagacaaataattcagaagatcaaatcaaggctgtgtgttagtttgagtcttgatacaaaacaagtaacttcaaaatagttcaagtctgaaattcagaagaatatgggcttcaccaatgtgtacttgtcaaccccctagtgaataatatttctgttatatttaatgaccattgggcctgactcatgaatttgatggtaagcagggtaggcttgtggcctcgggtatttttaagcatataagcagaaagggggaatatgtaaggtagaaaaaggacatgaattttataataaaaatagcatgagtgtttagtggatggagtttaggtatctctatggaatacagagttaaacagattaccatatgtttccttcaggagcatttgaaaaatgaagaccaaatgtgttttacagaatgatgttcttcataatgcagatagccactgatttgaagctgcagctaaaataaatatgataccttttgagtgctattcacagacactagtgacctatcaatttccctatctcgggaaaagcgaactggaggatgacagctcactcccagaagagtggttgatatatgttaagtggctgtgtctctgcttctgattattaattgtggctaatattgagaaagaagatgtccccagactatgcagatgcttctcggaatggggatgtcttcaggcatagtgggaagaggcgctgcgatagtcagaacttccagatctggtttccagttgtgctgataaaccttgaggccaagcaagcttaaacttccgagactctcccatttcaggccctgggagggtgctaccaatgtgttgtcatggttatatgtatctctaaaagctgtaaagcataatgttttatgcttaacctgctgctccccacataaacctatcctcaactcacctttccaggaactggatcttaaaatgccagtggccattctggttaagatgctacattttcccactcttacttcccctccacaatacttctctttgaattagatggcattagaatggccactggcattttaagatccagttcctggaaaggtgagttgagggtaggtttatatggggagcagcaggatatatacatgtggtggtccatcactttcatttatggttaaggtaatgctagtatcctggtataggaatgacttctaggaactctcatgcacccactaggcctatgaagccaatgctgcagtgggcaggtgcagggccagtggaagtacagcaatataaacacatcctaaggtgtctgtactgtcaatgggaagtagagtagaaaaagagtttggcataaaaggagcagaaagctagcctgctgacaattcttctaaagatcagatatgtgtgcccttgtaagtggaggatttgattctcatcaacacttagctaaattggaagttctctcctctctagagtatactcattaatgcagaatgcacaattataaatgtaccacatattatttttcttttttgatggaaatttaaaaaattatcataattccactgtttaaatttcttgctgatttgacacagaatactaacatagatgaagataacataaaactcataatacaccattaagtaagtgtataagtgacaaactggtaactggggatccttaattcaaagcgtgtttaagattagtcactacacaaaaaagcttgaaacttccctgaaattctgcagctcatgtatgaaagaaatttgatagaggctttcccaaatttgacaattctaaaaatgtttatgacattaccaataatgtgttatagagttcacataaatatttgtaaactatcaataatagaaaaggttttgatcaaccatgctaggggaaaagactagaattttttttttattttctctatagaaaaatattttataaaatctttgtcacgaagaggtgatcaaagagtataaaacaaaaaatgtcagaaaaatattttagaatgtcaggcagttaataaaatatgaagttagttttctagattgtgtgatgtttgtggtttgttagctttttaaaatttgtgatttgtcttgatttattttctcatttcaaataaatattcactttcttatctaattttgtatccataattttgattccttttttaaaggagaatccaaactgaataaggtttagaatcaacaaaagctgaatcttgccctgcagctctgtgacactgaacacttcatctgtattggcctctgttctcttacgtgtaaaatgggaggtaataacaccagcagggtgattgggaagagagcactacaagaataaatcaccagaaaggacttgtataacgacatttttatgcaaatatgtagactctatgcagagtctacaaaggctctggactatactgaaggtgtcaggtaccttatccccaataatgctgctcaacatcaagggagaacttgctaacccatccatatgagtctttctgcattgaccaccatagggtcatctttcctgggtgtcaggaaattgagttggaagagatggggagagaattacttggtagttgtctggaagttctccatccttcttcatcttgtcccattttgcatttttctaaaaatagaagacaggagggagcctgaagtcacacccctgctgcttctgtgttttcttctggaaagtagtcatggaaaattggggttcccatggtcatgttaaaagcgatcccagtatccagactctggtttgtggtgtgaaaggcagagtacacagcatctttctttttgacagttacaaatgttgcaggcacaaagtggctctggggtcgctcactgtagaagcagcttcttaatcctgaatcaggaagtgttcttgaggccatagtgtcgcagtggcagcttcctgattcaccatatttctgatgtttgcagagctcagagtttcctagtgggccatttctgccatacttttccactcactcctagaggtgatttttcaggccttccagcaatgattaggtgccccagtacattaaatattctctgcatccaaatcttactgatgcaggatggtgagctgatagttttaaagcagctgcaagggaaattcccctaccatgttgcaaagtgaagagaatcagaaagttaattccattcaaacacggagaatcagaaagtggcaggattactgatagggatttgcattttgtggtgaggagagagcagctttaactttcacgatcaagactaaatgaggccatatcactggatactggtacagaaagcaatgatgaccagtgaccagaatcccaatctctagaatgtaagactcaacctcaagtaaagggagtttgggagactccaaattaattttatgccacctgatttaaaaaatgacaatgaaattaagtttggagacagaaaagtaaatgtgtcttttttgcaccctaagcatttggattaagatcaaatctactactgaatagaagccaccaataggagtgcttgcaggtgccagccacagggcttgtcaggctttaatgcacttattccacttactcttcatgccagcccaaggaggtggggctgttagtattcccatttgatacatggacaaaagggaggctcagagaaagtaagttacctgactgcccacctcaagggggcgccaatcagaattcaggcttaggatttgcatagggggagcatcacaagtggatgacgaattatgagaaaaagacaaagatttggaatgagagagagggttgactgattcttgaacagtcatatgcagcatgagcctgttgcatggaaaagggagggaaactctaagagaatccaaaagtgagaagagactcacgcatcttttctaagttaatatgggatcaccctcttctcttattcccctaggtcataatggctgctgtgccaaacactttgctcccatctcctcccatattagtctgttttcatgctgctgataaagacatacccgaggctgggtaatttataaagaaaaaaggtttaatagactcaaaattctatgtggctggggaggcctcacaatcatgatggaaggcaaaaggcacgtcttacatggtggcagacaagagagaatgaaagccaagtgaaaggggtttccccttataaaaccatcagatctcatgagacctattcaccaccatgagaacaacaccacgtgggaactacgggagttacaattcaagatgagattccggtggggacactgccaaaccatatcacctcctaggtaggtgctctgaacagtccacagcaagttgagttgtctaaaattaaatgggctcagctcatattcacttattttcgtcttaaaagtgggctcagagagatgcttcccacctcaactgtagtggagaaaaacggggtattttccctcgtcatgaacagcaaacagattcataggaagacatctccctccaagtgggggtccagatggccactgcactactctgggtcaagacatacaagaagcaggccaaagacgagggtcattcccagcatccttcccagttctgagtcaggtgtaggccaggcacttgcatgggaggctgcctctgccctttgttggcttcttggctctctccttcaccagctcactcacaccctggctccttcactctgctttgcactcactgccttaaagcactgtggttaagaaagtgggcttctggatttgcatcctggctcaaacacttatttgtgacacacccttggacaaaggtttcacctctccatatctgtaaaatgggatggtttttattcacatggctattgtaatgatgccatgagttaaaactggtcaagtgcttaaaacagtgtctggaatacagcagatgctcatgaaatcttagggtgtttccctcatttattttagaaccatatgttcccaagcctcactcactgacataccaatttcatgatttttgccacattcaagtaccctctgtaatagtacagtatttgcttattattttatctaactcaagttgctgtaagtaatcatatcaaggataaaaaggatttaatatgtgagtttaattttttccaacatctagttcttcattccttagagaccaaaatttaaaagttaaattatcttaggcatataccatcaatgggatgggagctacattttaggaaaaacttgtgtgagtaattgttttcacacttacttttgcttactttattactagtttattaatttactgatttctctagtcattcaattactcattgggtcactaattaataaaaacatttttcagagtcatttactgaggacccaatggcttgtgtcctgtgacggatggaagctggaggcttgcaaataccaaccaggtaagtcctttccctgggggtcccgatgagggaattggccacacaaacaagcaattatagcaggaggtcaggtgtggcagaagatttgggagcctagggggaggaggactcttcctgttgcctaggggagtctatgctcctgcactcaaatgattctccagggcatacactcagcccttccctcttcatgacgcaatcatcccgggtcattgccaagtggtgggaacgtttatgaggaaagtcttccgtgttgagttaaacaatgaagaaagtactaggattggattctgcccaaaacgaagatgcttcatgcagtctttccttcatcccttcctttcaatacatatttactgagtacctactgtgtgcctgacactgagaattcagtctctgccatcatggagattaaaatctactgtggcagccaggtgttatggtacaaacactcatacaaacagtaatttgcttataattgtgacagttgccaggagaacatctatagtgttatgagagtatgtagaaagctccaattagattagggagttaaggctgtcaactctgagaaggtaaaattgaaggaaagacccaaagaatgagaaggagcttgccaaggtgtgtgggtggtggtgatatagtagggaaaagcagtgttacaggcagaggcatctcagcatgtagaagggctggacatgggatgggcttggcaacttggaggaacacagctttgatggatattaggaaaagatctagaaagtgggatacggaagatgaagctggggaaagatggtgttcacgatcacctgggactttgtaggcaatatattgtctacctttatcctaagtgcaatgggaaaaaatatgtgaagattttaggtagaggagtttcccaacttgatttacattggggaactctcactctgactgcagcatggagaacgaattgggaagggcatgaacctgagctgaatgcccaagtcaagggtaggaaaagtgcagaagagggctgatgaaagtgacgaagcagatgacaaaaatattctgaatggatcctgtgaattaattgccaaggtgatgcccccgagaccaagcaggaagagggcactgaggaaaccaatgtcacagttatatttagagtttcccttgaagctcacgctctggaaaaagtatgggctctggagcaaaggaggctgaggttcatatcctgcctttctttcttttttttctttttaatttttgtgggtacatagtaggtgtatgtatttatggggtattgtctgtagttattttgcagcttgacctttacctctgaatttgcccccatttcttcatttacagaatagagataacagcactgccctcatagcgtcactgtaaggcttgaataaagagtccatggaaattctggcacatagtaggtgcttactaaagtgcagtatagaagtaggattgtttgtgttctttttctctctagatgccgcagggaaccaagcgttttcatcagttttacaacgtattctagagaagcagccatagtgtaaaaatattctttctgatatgctgcacattatagcaaatggcattattcatggatgtgtcaaagccataaaataggagattttgagacgatcacagctgtgaatgattaatattttcatcccaagatgccacagaggtaccaaggctatgttaattattacatgcctgagcctcgtactgtgggcttcctccccaagtgcctgttaatttgctcatatgctgtgcagctgatgggactagaaaactctccactcagaacacacagtggatctctggcagttccttatgtccctaataactgctttatacttctgcggaaggaaaaaaaaaatgaacaatctccaatccaacaacaatgatggggtttaagcagaagagaaacgttagtagagaaatgttttatcaaagataacttcaggcttttctttgtgtttgcaatttacttatccatttattaatatacttctgaatattttggatgctgtattgcaatcacaaatatctgtactatcatctttcaaatttttttcatttttaccaaattttaaatttctctgaattatttccccattaatatttaaatgtatttttacatgtatcaattgttttctttaaaacgtacctgcctcccagatgtaaggaaagcaactctatctctaggaatatttgtttaagcttcaatgttgtgtgtctttatttttgaggagtttgatttcatatattcaccttctaaaaccgttttttaaaacatagatggattttttttttaaagcaaggaccaagagctgagtcctcatcctcaaggtaaatttgtaaatttctctaaaccctagtgtgctcttatacactgaaccaattccttctgcaatttccgtaaatctctctattcatacgatctcactaggatcagtctctgttgaaaaatctagtttaagctgcctggcagtctgaaaagaggaagatctattaatttaatcatttgtgtgaatcatgtctaaatggtctcagcagagaaaatgtgttagccatttaaatcccatcattacatattatataataattactgctaattctagtttggatgggccacaatttggctttccattccctaaatgtggagggtaggatgacctcaccgaatttagcctctgcagcttctaggctttctcttgccttcctcattacgaacttaatagccacattcagctccaagcgtccagtccccgtaaggtctgttttgtgctcataattagtattcattttgtgatcaccgagttcaccctcagcacagaacggagcctaatgttaatcactgctgtgcctccctccctttgactctgatctgtcagcatcgtgtggcttgtcccatacctaattttttgcccttaccagccaacaagcacctccacatcgcgcagtgtcagaattagaaacttttgacagatctgtaatcatgcagttctcatcaactctatgcatgctagtcatttcatttccacattcgaacagttaatatgccttaatttctctcactttgtgaatatttaattcctcccttttcaacatcatttttaggttgtgtgaatcattttcaaagcctttgctctgttcccgcactatcatctgcatattttatgaaatggcacggttgagtctcggagggctcttgataaaaatggaactggcagcctgctcattagctgtttacctggagctgtgtgagcccccgataatggcgagctcccatttggattcgaattaggattctctgacgaatcaccaccagcagctttctccaggacgtccgctcctcctccggtgcctctctctccccatcgcagagagtttccaggaaacttgcttttgggggctgtcctagggaacgttacaccctggcatctgaggcagtttaatttttgaagcggagacacagaagctttagcaaattagcacctctaaggatggcaaaattcccctgaaaggacacattctgaaggtctggttggttgaccttccagagctttacagatgccagaagtcaattccctgctataacgaggtgaccagttgtcccactttgcctgggactgcagatccccagagcatgaaacttaccattttgaaatcaggaaagttccaggcagttgaagatgggttggtcaccttcgctgtaactcacttgagggcttgtatcatgttgtcagtctctgaagtagatgggaagatcttcagtggcttttacaaacgggctgagccacttctgtgatttaccaagaggacttagagaagagcacaggccatagccctgtggtcttacaaggttggcttgaaaaccagaactgttttgatggacttatagcttgcacttaaaaatcaggaaattcgtatgtaaaaatgcaggatttctgcctctctttgaaaaccaaagacatggctctgcgatgtgcccattctttttagaaatgattgatcagttggagccaaacagggactatccctttatatggggcatccgctttccggttttataaccctccctttattgcccccagctggatccattcattctgtgtacctatttggtttcagtttgcatctgattttgtgcttctggatagaagttgagagcactggctttgcagtaagattcaagtctcagttctattatcttttagctgcctgaccttggccaagataaacaaacacacttggtctcagttctctcacctgtaacttgagaataataaaagtatactagtatagcaatatcttattataaatattacattaagtaagatatgtacattgaagaaatgcatataaatggcttagaatgggcctggatagtaagtattcattaaaagtgcttggtttttttcttcttattattttattattattacctttacagaaaaatgaactgaaacccagaattccctggtgagctacttaatatataaatagacactatgtgaacacaaagaataaaagaatattactggcattaaaatattttgtattttataatgtatcttggaaccaaatattgaggtatactcaaagcaattccaggtgaccacctgtgtaattaatgaggcaattgacaaagctacaggaaacaaaacattccgttttttatgtacagataatcttgtcttcctttttgcattagtaaatcctccaacacctttttgaattccataaacctatactttttatacagagtgaattcctttgtagtagaatctgtttccttaagatttcctcctgctgaaatgattttatcctatagcagccttgtgttactggggattttatggccaggcaaaagtgatatactattaataccttggatttacacagcaattgttcttttgaatagtgcagaggtactagacgattctcaaatatatggtatttgatattaatgaggaagatgttataccacaggaaacaattgtttatttttttaatgtttcccccttctcttttaaaacagactcctgtaacactacatgctcagagtttttctaaggagatatttgggaagcgctattgttgcgtgaaaagtatttttgattctgggtcattgaaacctggatttgaatccctggtccctgatgctctctgggcctggcacccacagaatgcttatttttgaagagagttgaataaagggactctctacaaagctgtggacaggatctagggaatatgccaggaataatggagcacctgaggggtggtaacagaggggctctttcactacctttacaactgaaggggcaaggggaaggagagatgaccggacttaggagacaaagggctgtgtggagagggctgccctgtcacaagagggtcccagttggcttgttatgaccccttggggtgggatcaagggggaaaaacatgctgagatcacacagtccttcttccttctaatttcctggcagaattccccgttggtcaaacccaaccagaagcttcagaaaaaggaacataatctttgtgggagtttgtactgcttaccctctcaggacacagagagcatgcagacagtacaggaggaaatggaacaaacccaaagtcaccagatgtctctgaacaagttgttcaacttctctgagactctctcagactgagtttacttcttagtaaataaagctacataatacctacctcagagtgttgtgagagaatgaaatgagataatacatacattatctggcacagtcccttggcacatagtaggtctttctgagaagcatgaaacaggttagtgctttgcccaggccatttcatcttcaaggcaacatgagttgagaaaggcttgggtgctagaagctttgtgaaaatgtttgagctctgaaaattcaagtcatgatttcaaaatataaaattagtctcaacaatagtcaaatctctaattgattttatatgaagtataatcatatgtcaacgaatctaactttaacctactcttacttagttctatataattaaaaagtgggatgtgtttgctgttatgctggcacttataaagttttcagttcatctgtttcacatactggttttcccttggaaggttatgtttaaaaagctctctgtaaattgtcatctcaatgttgttgagtgaataaaatagcctagctctagctagaaggaatgtgaaagaaaatatagactcagcaagaaaattttttaaaacttgtggtctataggtcatactcagtcttacgatcctttcatgtgtaaatttaaattttgtaaagaatttttaatttaaaaattagaaatcaaaatattttaaaaagaaatcaacttactatacttcattgattgcataaaaatactttttctgtctatattttaacttctcagaaataaagatgcatcttaagcaatgatatcttagacttgatgagatacagtggtgactagcattaaaacatcatgagatttcatgtagaaactgatatttccagtttcaaaaagctggatggtctctcagccttggacctggcactcatacagcccctgtggtggaagggcctagctctgagctcttgaaagaggatgatggctctcagagacacctcatccttacccatgtcttctctgctttttggaatttgaggaacctcatctaccagcctccaacttgggctctggacctgtaagaagcccttataggaaggaatagagatgcatgggctgattttaacattacagtccactaatgggcgttttacccagggtaaatcaacaaatcaagtgttggttcgcttgagtgtaataatagtggttctctcctaatcagaaagttctgattagcagttgatgagcaaatagaaatagcaataaaataagaggtgaggggcatgaggtccatcatgtagtaaatggagtgtgacagataggcatggatctcttgggaggagagacaaaggggaagggaaagggagtccttggcagtggaaacagagggaaatgtcactccagggacatttagtgacctgtccagaaaagcaaatggctaactaggaagtagcagttctctagacattcagtccagtattctttgctttcaaacttcattctttgcagtcaaacttattgaaaaaatatgttcaaactctatagacaaacactctctaacaaaatgactttcggagaagagattttctctctttcatctgggtatacaccagcaaaagacctgaataaaatcaaccctgctacattcttcgtgtagaatattcctaaaatatgtttgaagatattaggggttttcctcccagcattattatttctcatggaaaatcctttctatatcctattttagattatgtgctataatatacttggtagattatagataacatctctttttttctgagattgcacatttgaaaatttgagattacaataaactctgtgtgcgacagtgaccagagacatggagataatgtatgtgaatattctttaagctctttgactgaaagacatgttacaaatatgagcaattattcgatactatatttgaaaaaatatagatcatccaatcttgcaaataaaagataattccacagatgatgttctctatgtcacttttctaatcttaaatacttgaagtgaagaagcttccaggcctccgcttgtatgactgtttcacaatctaattgatctcactgtctgaattgtcctttcttaatttctctgcattactcatttactgtgctcactgttcagatatctgcgagaggtagcaggcctccccccaaccttagtcaattagacaagctattgtttctgattaagatatcacatcccggagaataatagcaattagagttggaacggagaccctgtgggtcgtacagtccacttccctgctggctcgggagaatgttttacattacacagtagttttatatggttttcctgatgttggttttaaaaaatccaagcacccgtcagtgttaattatatccctgtcctgcatccccaccatgacttaattttctactttgcattgctgattctcataaattggcattgaatgatggcttcttgatgatatcacctcatcaaaatacagggacaatagacttttttttcaataagcagagaaaggaaatattataagttttggtttggtttttgttgggaggtagaggtgcaattttatataggtatattttttgccagggttcctggtttcaaaatacccccaacatataagatttttttttttgactacagtagtccctcctcatccaaaggggatacattccagaacccctaatggatgcttgaaaccacagatcttattgagctctatatattctgtttttccttatacatacatacctatgataaagtttaatttataaattaggcatggtaagaaattaacaatactaacttgtaataaaatagaacgattataacactatactgtaataaaagttatgtgaatgtgatttctccctccctctctttctaaatttcttattttactgtactcaccctttttcttctcttgatctgtcgatctgataatcaagacacgtattaagtgactaacgggcgcgtagtatctacagtgtggacacactggacgtagggatcattcacgtcccaggagggagagagcaggacagagtgagatttcatcacgctactcaaaagagtgtgcagtttcaacatatgaattgtttatttctatttaaacctcagttgactgtaggtaaccgaaaccaccaaaaacaaagccgtaaataagtggggggactacagttttctttttaaaatcagtcatttccattgccaattatctagaaaagtttatctatgggtgtagagaatggtgtctgtaagaaagaagttcaaatttctagaggctttcccttgagccagttcctccactgcatggtcatagtaggggaaaataatcctaagtgtagttaatagaatattcttataaagaatatgatgatgataaaatgattattatcactatgtacttttgagcccttacaacatgcttgggcactgtgcaaagtactttgtatgcattatcttacttaatgctcattgctatcctgatgtaaggactattaatacactgaatttacaaatgaagaaaaagaggctgaagaagttataaaacctgccaagattaccatactcataaatcatggtgacaaataatagttttatttttacaaatgttttattaattaaataaattaaaaagtaattaaatcaactgttttcaatacaagtagtaaaataaaattgtattttataattaaaattttataaatattaaaaaattttaaataatttgattattattatttgtcttttaaattatgatatttccttttttaacatgggtttctgaagaattggaaacttttttcaccttactggtggcaatctgaatgggaaacagggccatggttgctgtgattgaatttgggaatttccaaacctgtctctgcatcataatgaccttcacattatatcaagccacagtttttcattaagtattttatttctcgaaatcctcttatgtaaatcaacctcagagtgatttagcaaataaacgtgttttgaacattatcatttttgtaattttgcaaataatacaagcacattatttgttttaaattaaagaatatacaagagggaataaaatgatagaatggccacttccccgccagtgcacagactctattccaactccctgacatatctcctactgagagtttcttgtgtcttacaagaaaggtattacaaatatgtaagtaaaataagttttgtgtatttttttaaacacaaatgggatgacactatgcctattgagccagaagttgtttttctaaatatagataacaataatgaataaataacatgtttaatatatgttacgtattactttaagttctttatatactacctcatttaatcctcctgacaaccccatgagatagatatatctttatccctgtcttacatgtaagaaaacagagagataggttaaataaattgctcaaagacacaagtttttaaagggatgaagctgggatgtaattataccttgaggatgattcaatattagggaatagcaatgaatgttactacttttagactctgtataatatttcaccatttaccaaatgagcctcttaaaatggacatttagacatttttctttccctattttaaatagtattgcaatgactacctttaggtatacacagctttgtgcacatgggcaagtatttttggttcaaattcttacaagaagaattgcttggttaagaccattgcatttaaagtttgggagataaagccaacccatccttgagggaagctgttcaggttcccccccattccagatgccccttattacatcattaaggcatgcctggttctctcctcggtgtgtgtcaagaggaattgagaactgtgaaacaccctatgtgtgttgacactgctatgcatgtactcactccctaacattagcagggagtatgtttttctcctctaccccacagcttaagctgttactatttagacttgtggcactcaatggggatgattttgtctcccaggaagctttggctatgtctggagacatttttggttgccacagctgattggcagagatggtgctactggcacatagagtgtaaaagctaaacacccaatgatgcacatgacatctcctctcccaacaaagaattatccagttcaaaacatcaatagtgctgaggttcagaaaccctggtttggaatccaactcaattataaccctctctatgatacctttagtaaactgctccctgctaacaggtgatgctctgtcctttaggctgtcaaaggtttcattggatgttctctttattgtgttgtgctgtaattgcttgattacacagctatcccctctaacaggtgacctactatgtgaaggttgacagtatcttattcatacttgtattctcaccaccagctccatttcataacatattgcctggtttatataggagcttaataaatatttgctgaaggaagggaagaaagatgaaacaaagagggaagaaagaaaggaaaagataaagagagggaggaaagaagagaaaaaatgaaagaccaaaagaagaaaagacaaaaggaaggaagaaaaaaaataatgaaacagatgcatgaataaataagttaggttccaggtgaggacatcctgaggaaatacctttggattggtcttgtgaaacttagaatacttcactcatttattttaaaaagtatttagtgagcaccaacaatgttctaggcattttaataggttgtgagtatggtgaatcaaacagccattgttcctgtcttcatggagtttgttacctcttgagtaagacagacaatataaaaagcaaacaagggttgagtgtggtggcttatgcctgtaatcaaaacactttcggaagccaaggagggagggccgcttgagctcaggagttcaagaccagcctgggcaacctagtgagacccaatctcttaaaaaacacacacacataaaagcaaacaagccataaggtaaagtgaaggaagggtcagtcaggacctcctctatgaagagtgggaaggaggtgcatttgagcttaaaagagattagagatttatggaatggtagtccttaaagtataaagaagtcaatctggaaagtctaactggaagaatccaggtatggagacaatacaatatctggaaggtagaaaaaaaaattttaaatggcaggtacaggtgcagaagctggactggtagctgtgctgactgattacagctaactcacagaagttttacaaagtgtatatttgactttcaatatagggagagaaagaccattaagaacaccaaaccagggatgcgtggacgccctcttggaagcccctcacccttgactctggtgtcacctttgacacagacatacaatcatcatgaacttcaggccctcgttatctcctgtaacaccttccctgctgctctccctgtttctgttccattggttctcatctatggccacattatcaatcacttgggaaggttttaataaaatcagtgcccaggccttgccacaggccaattgaatcaaaatctctgaagaggggctttgagtattatgtttttcaaaagccccctagattattgtgatgtttggatggattgagaccctctaccatgttgcttcatgggtaaaactctcaaaactctgaaaatttcttgcccatcttagaattgtccatcctcaatgcctacaggattgaatccattctccgtggcttagatttgccctaattttccagcttcatgtttttggatagccttatgctcctgctacttggatctttccttttgttgattaggcagtgctctttcactcctctttttctgaacattggctgttccttccacctacaattcacttcccaccaccttcacttggtcctctcttacttacgtgccatgactcaactcaaatatgttctttccacacacccatacacaaagctagttactcctttccctagttctcatggcaactgtactgtaacaggttcaaatgtttacagtctcagactctgcactgcagaaatgcagattcattttcttatgactaaaataaaatgtttacccaagatcacttatttccactaatggctgaaaattcttaatctcatcaccttagtcacttccagattacagctcagtaatatacaaagttctctatccatgctccttcaggacagttctgcaggtggctttgctttgacccagttctctcatttttcttgcttgtagttctcaagaataactatagaatgtacagggaatgcaatatcttgagacagagagaaacttcctgaagtagagcttgttcttgtccctcctagggaatgtaagatcttgagttagagaggaactgcctgggacagcctgggttttgtttctccttcctttcgaagcagaatgttcttcaaagcttttcccagtgagtctcttggcccctgaggcatataacccagggcaagctgtcttttggggtctctcacctgcagtgcaaatgtggcatgggtagtcaagactccattctcccaggccagccttgttgagccttaggggactggttcacaattgatcctatgctccttttgtcccttgctgcctatctgtgaataacaatcctgtttcatgtaacttgtttcatgtgtgtgtgccctgtctcatcagacccaggcattggtaacactgcagcccaggatgctataggcagaagggtttggatcctgattcctggtggatggtatagtgatgatatctctgctgtcctccatgcggtggaggtcctcctttgggactggttattagtgaacctgcttcacacacccctcacttccttggttctataatttgcagagcattgaggtataatgggaaagccatccaggcattaggagagaaatctccagggctcatgccatcttcgtgctccactggcctccactgcagctaagttactccatctggtgtttgggaatcatattccagaatttcctagtcacatctggtatcactgaatttgttgtctgttctctgcagctgagcctatatccactgttccttgggagctcaggaactgttggctggtttcctcacaccaccttgacacaatcaggactcaatgaggactctgtatctagagatgtccctcagcccctgctaatggactgtatgggggccacgtttctctggtgctgttttgatgcagcactgtgcttagggagaacaggcctttctatgagactttcaggccgaatgggctacacaggaagaagtgagttacaactctccttggcctaggactttcctagacctatctggtcatttatttcattcccaacatcttccaccaaaggttgcgcccatgaagagagaaagggaaagaagaacttcctcttggacacccacaaaaggctttagtctgtttcaaaactcttctttcacctgttctcatatttttaattttattttcaggtgagaatgagtctaccacatcttcacatatgtgctcctattttttggtttatttatgatccatggtgtaccccagtcctccaagctctagcattaatacttgaaattgagacaaccaaccaaccaaacacaaaaactctttttttttctctctcaacaaagcttggctcttgaaaatcaaaggcactttggctttcagggtattaattgttctacatgttcaataaattgtaaaaattttttgtcctactctgtatctaacttcccctcatgggggttatagaaatgtggtaaaaagcattggaaacctatagatttcaatatctacagttttctcccactgcaagatctgtaatttaaccttgattccactgcattgtcatcctttgtttacccttcacaccttacctgggagctcctctgggagcatttctttcatcatctcaggagcaaccctcttggtgacacaacttaaacactcaatttatcaataaacaaatatttgttgagcaccactgtgtgtaagacaccggactaggcattgagggtgggcactgatcaatatagtcgtaatttcgatggagcttgcaagctaaccaggaaggtgagtattcaataaatcataataaaattaatgtattaaatgtaattgtgatcattgttctttatcatatattcctccttctggttgtgaagacatatcatgggggttcctatttattttctgaggaagggacacttgagcagagatgagaagtaagtaaaagttaagtaggtaagcgatagtcaaatggagttgaaatggggagcatttaattagggaacacggcagaagattctgaggaaggaagaaatttagcttattcaaatcactagagaagatccattgggctgggggacaaagaaagagagagggtgatctgcatgatgaattgatgaatagacagggaccagaccaggcattttcatgtttgttgaatgaatgaataaataaatgagcttggagcaacctgaaactttgacttctgctctagattaaaaactaccattgcctggagtctgtagttatgtgacattgactcatgcaattgtgcatggtgtaatcataaaacaaaccagagacaaggcttaaggcaacattgaaggaagtgtcctgaactttaaatgcaaatcaaactagtagcacctcttctacagtgacacctttagaaccaagccgttacagaagcatttctccctcaccccttctacttggtggtttccagttgagtgaagaaatcattgagaagtaaaccgttccaacatcgtgtgtccaaagtcaaaggatagccaggcatctgctgaaaatggaatattgactcaagccccagatggggaatatttgaaaagcactctgaccagttcttagcagtggcagttggaacagaaggaaaatcagggatatgcaggcatcctcaaccaatggagaaccaggatcaatgggaaaggaattgactcagggctagtaggtgccaggctgaaaggcagaactccaggaggatcaagccagtaatcactgctttgagttagtaacctggagatgtcaaagggatcatggcgaatgccctgagggtttggtttgtggcaaccagccaatcagaacaaggattttactctcactatattatccgatagctctaataaaagtcagatgggagagctaatcagatcgttcccttggcctggacccttttaaatcaaagaagtctattttggctctccatgttaagtagacccagagacctgacattttgtgtttatttgaaatgataaacttaatcatgagcgaaatgttaagagatgacagaactggccacagtaaggtcacatcgtgtccctgccaaacataatacaggcttttgccttcactgggttgccaattcctgccacaggaggcccgaggcacttgcaaatggggaccggagtctgtctatgtgataattaatccatggcgctcggtaaagactgccaaatctgccatatggtagttttatgatctggactgctgttatctctggagaaagctaacatcataatctcatttacttgttatctgtgattaggacttgtacttctacagggtaaaatgcaggcatggtggggaagcccagggttccagagccctgagatgctactacccaactttaacgggaaaagtgagagcaccattgatatatacaggaaaagacacaaaactctgatgtgggcacctgcatgtgtcctgacctcacagcatttgggtcccatgaagaaacctgacatatattttataaggactcaactgtatgtttaatagaaatacccaagaaacactcaagaaagtcagaggggctgcctcccaaaagtattgtggaatagaatcacattgcttcctcttttgtattttttagggatgggcaagccaggtgttctggatattttttttccatggtgaccttcagtttgggcgactgagtcacctatacaactttcagtggtgacttagactttgatgaactctcaaaagaattttgttgagaagtaaagcttgaaattgattcatgccaacataactacaaatgacattgtaatagtttcttactggaactccaccatggagaataagggctgtgggttatcccaatatctgtgtgctctgtgactgcatccttttctctcctactcaaggaaggtcattatcaaagatgaggctgatgcagatctgagaccatacacacggttttctacaagactcataacatctctgatgttatctaagttaatttctattgtaagtcttgtggcatacactattgattgattttctaatacacactcttcctttttttgtgtgtgataaatatttcattttttttttttttttttgtggatcacaatgagccaggcaacatttcatagccacccttgaagtcagcattagccatgtaacacattttggccaatgagatgaaaatgagttggtatatgggtgtttaaagtgggacatctaactgttctttgtttttttcatacttcctctaccttttttttctggttggtgctctagcagccatgttgttagactcacagagagatcttgaaattggaagcctcgtgttaagaatggaagaacggaaagaaaaaatcctgagtttctagtgatgttgacactatcatagcagccccagaatgcctatcaacaggctttgcttacttgagggagaaatagtttttatcctattaagtaattgttgtctcaattttctattgtatacttctgaaccaaattcatagctgatgcaaatctctatgatgttaaatgacagaaataaaatatttcagttcatggtactcccctctttctcagggttggctttaagttcaaggagcttggataggaagcagaggtgggtgtgaggtggagtctggggtcatggattcatgctgcattcactgtcttgtcctttctttaatctggccctaggctgtcacccatgcagatttcacctgcatcctccttgttctgatcacagatggcttttttcatctctatctgccatatctgctcttggtggcccaggaaactttccactttccccaagatgtttttgtttgaagtaaaatccataaaagagtctcaggcccatctacctggaccctattcaaggataccctttccttccacatatgttaggtgttaaaaacagagattcccataaacttaccacatggatatggtcatgactctgccatgaatgtggtggcttaattcatatttgggtagatataagcttgcatcaattctaattcattgttatattttagtttattataaattctagtaccttactgttggcaatgattagcttgcaactgacttcataacagaccatgacatgccaacgagtatatacaccatggctagaaattcctggagtaagatggtcttctgggagcctgcagatcttggagctgcctcatcatcatttaatgtagggaatagagaacccctgtcctaatgcaccaaaagttataggccatgaggatctgctagcttcgtagtcaccttgtaaaactcacagggttaggactatttaagctccaagagatcctcaggcaggaaatttgctgtcccttttttaagcaaatttgcttccatgtgcactttagagccattctgagaatgagaagcagcagccggctggtcatagacgttacatatacacatatatacacatacacccgcacacatatatctgtatatctatatttacttgtgtatatttatatacaaatatagatatgtgtataaataataaatatagatatacagatatatgtgtgcaggtgtatgtgtatatatatatgtgcatgcacatctgtattatttttatatatgcatgtataactttattatttttatacatgcatctatatgtttattatttttacattattattgcattataggcatgtatactttgctatttgaattatcttcttacctgctataaaatttaaaaatatatatatatgtaaattgaggtcaaattcacatacagtgaaatgcacagattttaagggtataatcccatgactttgatcactgtatatgcactctgtgaccacaaccccagtcaagagagagtacgtttctgttaccctatcagttgctaggtgatgtactaaagatgttgttcagggggcttgaaaattcgtgtatccctgacagcccgagaagactggataatgtcccactgtgggtgggtacttgggctgtgtgtgtctgggaaaagagatcaggatattgcagctcacaggagtttctcacactgtggccttcctcctatcagtctttgacgtggtcattcttatccagaaatcatgtcaggctgttttccccagaaatattctgattatgtgaattagatcacgtggtctgcgataaatcccccgtcattgtcccttggtattttgaaaactgatgaaaccgctgattcttggctccttactttgtatgcaaatgataaattatagatgggaaataagaaagagaagactgtccctggcttgctggtttgaagtgaagtgagaaagaacagtgctactcttgacgatttattgtgacattgctcagaaaaattcaaaccccaaagcctccacatctctggggacattgttagccttctgcaggaattattaaaatgtacagaaatgtaggagccgcactttataataattaatcagggtctgttgattaataaagctcattttttagtcctgatgattcagagtatcatccaaaggacagtgtccttgtcattttgattaagaaaccagactttgcagtggaaagaagtacaggaacattcgtgcttcctccgtcttcccataaaataaatattgaatgagaatattaactcgttaaccttgacaacaatttgtaattttcataagggggaaaatcttgcatattcagcaaataaatcgctgcagggatttcaggaaaacaaattggagagaatgaagaatgctaccatatgaattctgtcatttttatgggccagggtgatttatttgtttgtttaggtccctcaattaaggccacaaatactgtaaggtgtcgagagcaagttaactgttacgtctggtatgaaacagtcaactagaagtgagaaagaaaggtcgcttgggggaagtgcataactgggccccaaccttgagtcttcataccttaccagaaccactttacctggggttagctgctgaagctgtaatttcactctattaatagtttaaagcttgttttaacagataacccctttcactgggcaactgcgagggaaaatcattaggtggaattagcagtaccagtcacagcttttctggggttatctaattattttgaactcaatttaaccaggaatagagataaaataaataacccatgaactatttaccttgctggttagaaggcttcttttgtccattaaaagagagagagagagagaagagaaatccaaagcacatgaggccagaatcaaagccctgttttcttaattttgcagtcatatgggggcctaggatatatttctctcctcctctgaccttttatacttttaaccctgagacatttgttaagatatatgccgttatgcatgcactaagtgtattgtttgctcccagctagcttggcttaaaacttcctgcttagggactgtagataatccagtttagggactgtggacaatccacagttttgtttgtaaggtgtgtttgctcactttgttggctccctgaccatccctctgcagggaattgaagatttaacatggttatttaatattttacttgaacactgactttttgaaggcgaggcatggattagtatgtttgtggctggtgaggtgaagagttaagtgaaacaaatgtgtttcatattttgctcagaacaaagtgaacaagaagcagggaaaacagtccttcaagtcagtgggaaaatctgagactttgtgcagcatgttgctgtaatgttcatcctggtttgaacagtttttagcagcatgatcttgatcaattcccttctgtcttgcagcctgttttctgtttaaaaaaatagggataatgataacacctacattgtaaggttgatgtgaggattaaatgaaatatgtatgaagtgcttattacaacacctgaaacatagttaagtctttggaaaatgttagctattggtaagaacagtgagggtggtgtggtgatgtggatgtgtttgtgggttgaaaatgacagaagagtcaacatacaagagaaactgaacaattaaatgaagttagtctctaggatcatgggaagagtatcaagaacggagatggggaagctggctttggattacaggaggacgaatgaaagagagtagtggtggaaatacatatatgtaagttgcaaatgaaggacatggaagatgaaggagtccatgcattagattcttctttccaattacatggtatttgggtgaacaaggtcaatgctgaaagaatagacactgaggagtatgtgaaaataagaaatgaacatgctaaggaatgaaaaagggagctgacctgaatcactggacaatagactagaggagaaactttggatctcactaacaaaccagtgaacgaatgtgtgttattgacctcgccaccagggaatgctttatatgaagagttgtggaagaaaatccttgggcaacctggttccatgatgtcatcaaatgcttggtcatggacaaaagataagaaacaaaaagattgaatgccgattgcatttcttacctgcaaaagagcaccatctcgttgtggtatgcacagtaggtactcagcaaacatttgttgggtgttgactcttcactggcttcaggtgcctcagggttagggttggatatggttttattaactgtcttcattgatgttcaaaggcaaagaaaatgagcaacaaaattcaataagtagtagtggttcaaagtataaaataaatacctgtgagtcacgaatgatataagtacatgattgaataaacacatacatatgggagagtagacaaatattccatgaagaagaactcaaaataatttatgtagacacaccaccctccagaaagtggagcaaattttcccaccccttaagtatggagtgttcatagtaacttccttccagagtacagtagaaaagatgagaaaaaagagtgaccctatagtggaaacacctgacaaggactacctcagccaggtgatgagggtaaatactaacagtgataggttatattgacagtgtctgccctggatgtgatgtgttgaaaatggcactctttacctcttcagtcttctcccccaaaattcataatgtcagtctgataaagagaaaaacattagccaaatcccaattgaggaacattctacaaaatacctgacaaaatactcctcaaaacagtcaaggttataaaaaataagggaaatctgagaaaccatcccatccaagaggaagctaaggagacacaatgactaaagataatatggtaacttgggtgggatcctgggacaggaagaggatgttagggaaagaccaagggaagctgaataaagtatagactttagttgataatggtgttttaatactggttcattaactgtgaaaacgcaccctactaatgtaaaatgttaataactatggaaactgagtatgaggtgtattgagagtctctgtactgactttgcaatttttctgtaaatctaaaactatcctaaagtgaacatttcattttaaaaaagcaaacaatcataaattttcacagagggtgatgaatgaggagtgaggctaaggattaaaataagccgtctctgttcagcatatgggaagaaaagtccagctccaaagggagctcagaaatgtcagcgtgtcactgcagcaaatggcaacactctttctgttgctaaaacaaaggtatacttcgggaagattctaaaatacaacagagagatgtacctacctaaaaacattctgggctgtcatccagagactctcaatacccctcttcctcctcctctttctcttaagtcaatttacttaaattccctttggaaatggcacttaccttccatggtttatggaatgttgtgatgatttcgtgagaccattcatgcaaatcctttaaaacagcatctcactcacaattacattataaatgatagttttcacagttcccactttctccttaacaatatagttctaataatgttgaaaacaatagatctaacattgttgaagcatcccttaattgtaaaaatatttagataattgtcaattttttgatcaatatgtaaagctttgtttaatatctttgtacaaatggattagcttctctgataaattcctttggataaactatcagatgtgagattattataaagtcaaaggatatgaatgattttaagcttcttgaagcatatcgtgaaactgctttcagataaagaataaaccactttatactctcacaggtcatataagatgatgtctttcagtagtgcatatatgctctggtcattttttttttctatataccataagcctctacctatgtataaggaatccctttagattcaaggtcgaggctgcctccccgagtagctgctgaagctgcctatgctcacttctccctgcagccttgaagctgaactgtcatccgggatcttccaattacaggggcccaggccagcccagaattggaatgggagtcgtaatgaggaagcagggacctgcagagccatctccttggcagctgtggggttctgagctccagatcaagttcctggaggagcactggccagagggctcaggcagcagccaaggtccgcaccaaggggtatcagcaagccatgcagtggcacctagtgctggatcaattttgcatgtcacctgaggccatgtgcatggctgctagtcctggacttaattctccagcttttccaggaatgctgtgagtgacccaataacattataataaattacctttcttgctgaaatcagcccaaatatgtcactgctgcttgcagtgaagacccctaatgtttatgtacatcattttatcatcccttaatgacacagagtattaaaatagtttttacctcagtccaaatgttaggtgaaaatctaatagctttttgttttaataatcactattgaacttaagaatcttttcagatgtttgctcatcaactggattttacattctacttttctttcctatagcatatgctccactttttccatagtgaaggaatctaaagaatcatcattctcagcaaactatcgcaaggacaaaaaaccaaacaccgcatgttctcactcatatggacacaggaaggggaacatcacacactggggactgttgtggggtgagggaaggagggagggatagcattaggagatacacctaatgtaaatgacgagttaatgggtgcagcacaccaacatggtacatgtatacatatgtaacaaacctgcatgttgtgcatatgtaccctataacttaaagtataataaaaaaaattaaaaaaaagaaagaaagaaagaaaaataaagtctcaacagaggaagaacatacaaaatcggagatcatggctctttggcagggagtgtcattttattttctttctttcacttttctgcattttcttttgttttcttcatagtgtcatagtaatattttatgtaaactgactatgtgctaatggatttcccaaaggctttccatgtattattttatttaatccttcaaaaatcataggagacagatagtattgctatccccttttcacggatgagaaaacagccacagagaggttttactcaagtaaaacttttactcatgtaaagttacccatctagcaagaggtggagccaggaatgaaacccaaacagcctactcaaagagatggacatttttcccttttcatttaggctatacatgatttctatgttgattaaaaatcaccaactattataaaactctaagaagaatggctatataaatgaatcattgaaattactaacaaatctgtaccaggacctgtctgttatggtggctgcgggcatatctctcaatttccacaatttggttgaaattcaaggttttctggagatcattggaatctgcaactttttatatgtatcctcactatagcttattaaaatgaggcagtagggaaaacgttggggaaagcagtcattcatttacggtggatttcattgactaatgccagagaccgtttgtgttccacttttgtttctcaaagtgctaatagcaagattctgtccctgaaatcctattactggtggcaatggaatataatcaggcagtacctgcaggataagtcaaaagattaaattaagttgggatttgaatccccactaaacatagaatcaaacaaagattagatttctggaccccagtctcagaatggctttcaagggcttctcttaaacaacaacaaaaatatatcattattcactttgaccactggcatgttaaaaggaaatgcagacaaagagagatgagggagggaaggaactgcaacactatggaatcagttctttattccctaagtactttccgactttgcagagcttgttcatttcctgactgagcctggagaagtcctatgttgaattcacacaagacacccatggaccctggaatcccatcaatctcgtcctcatccactactctgctcctgacattttggcatctgaaattgaattagcacaaggtttgttttggcttgaaaagcctgtgagaaggaatttgggaaaatctgcaattgagctaagtattggcaataaatatgtgaaaactcagaaagtggtgttgggaaggatttttttcacacttagctttttcttttttcatttcctgtttttattggtgatcttgcttttcctaaatatactacatcatgaccttttaaaagctgattgatgatacacaatcaagtattaactgcgattcctttttttgtttgtttgttttgttttttgagacaaggctgcccacgctggtaactaaaaaaaaatttttttgtagagacgaggtctcttaacactgattcacaaagttggaaatacttgttcaagttcttccctttctcctacaatgacttccatcaaaacccatgtgcttcttgaatgtatctttactccaaactggcttttacagttcctctagagatgtcacttttcttatagcctgttttataaagaaacaggcttcatcactttatcaaattagggaacaagaaagtcacgctaaagtgaagacaccagttggtgccttcaaaaacatacacattcctgcacatcaaaaatcttcaaagccacatttgaatctgacaacaccaagagcctatctattgtaaaatatataaatcaataatatcaattatatgattgtaaggataactaaaatttattgatcacaatacaagttaggcacatgtactaccttcttattacatgtattaccttatttgatcctaatcaaataagtgggctgtgtgatagtgtctagcaagagtgtgttcagtgggaaggggcagggagcagacaccaatgagttgggaactcctctttctgttgttcatactttacttatccaccatttagacagactacatttaactgttaggtataaaaatgcaaagcagtacagtcatgggtagaaaagggatttttttttttaatattggagatttaaggaagattggaagtaaaatatacaaaatctgctcttgagcatcctgtattgatgtaaatttactatgttgggactctacatttggctgtacatcaaacaaaccaaagcacaaaaatatacttatttcacaaaaacggccagggccagtctggcagagcttggccccacagctcggtgacattgtcaggatgtgtttctctccatctctcagtgctgcttccctctgggttgactttgcactgaagcaggccactctcttattggctgtcctccacaccatgactcacggcctatctgctacaactcctggtgacacaagagcacatcttcctccacatttctacctagggcctcaagtgtgtctcattggcctggcttgggtcacacgatcatctctaaactaaccaacacagccaaagagatttctctgactggcctggcctgggttatgtgcccaagcttgaagtccagggtggagccaaccacttggactaacactggagaaggaaaggccccctagaggagagctggggtgctgttaccaaaagggtaaaatggaggactgggcagacacaatccacagatatcacctctattcactgaggtagtatctgtgatgaaagaagagtgatgatgctgaagaagattctgacaatgattcccctggcaaagaagaaggcatacaaagatgtatgacacgaagggatgagacaacttggacaagattcctcacgtagaaatggggtaaccaaccatccccgtgtgtctgggacttttattgtcataggcacactaggatgagttggttgacctatctggacagtactcgtagactctgcgtggtgatctcttgtctcctttctctgaccctcatgccccagtcattcaccaggcttttcctgagcacagagcactgaactaggctggaccctgggaattcatagacaaaagactgagtcactttggccaaagagggagaaacaattagacaataacaagactgtagaagactgttaatgcaatagctacaccgtattatgcagtcgtattgaaaagtgagctaccaatgatgggggttgtttgtgaggttaggcgtgagaacattcccagagaaggtaacctctgatgtcagcattgaaggagaaatcagatcaagctcaagattcctgattccaagtaaatggtgtttccgttaagctgaactataaaatgtgggttacttaaacagaaatgcagaaaggcacttggtactccctagcaatggcctccttttgactgacgacttaaaatatgaaataagaatgaagatgcacagagacatggatgcaaattaatagaaatgtgtgtgttcatctgaattttaaaagactggttgatgtctgactgtgtcttatcttccccaagaaagagagcaaacgtttttgcaaattttggtcctatctgtctctgctgttgagacttccaccaaaccccactcacagagcacacatagtgctgtagcacctacaccacaagggctcagaagctcccctgctaccaagaagccccaccatggtcttagctcctatttgggagcagatgaaggttttctctcatgacaaaccccaaatatcagttttgcccagaaacaaacacataaacatgcatacacacgcacacacacacacacacacacacacacacacagcgtatcattctaaatacccttctatttcaaagagattgtacataaaagaggatttgagtcagggaaaaaccaaagcattttgtttcataaatagaattggtgtgggagttgattgttttctctcctgagggataaacattttaatttaataacagtcagaaagtgcctaaatgttcttgaggaaaaaatatggtgtttctagaagggcagaatctattcacttgcagaataattggaatgaagcatttcatagcagtgttactcaaaaataccaagccaaaatttctacatgtcagattttcttaataaaaatagcaatagttattgggcaatttgtgtcataagatatgtgtcatatcttatgtggcagatgctttatatgtgttatctcacttattcctcttgtcaagcctatgaagtgggggtcattataatccccattctaatggtggataaactgaggctaatagaagttagttaacttgcaagtaaggaacggagtaggaattcaaattcaggtctgtctaacttcagtctgtattaatcaccacttacatagcaagtgtgtctgcaacaccttccaatagagctgtctgaggtaggatacagatttgcaagagaagagaggactgaaaaaaaccaaagtagaaaaatgagtttacaccgtatttattaagagaatgccatcacagctgaggcaacagacagtgaggtggccaggccaacaaaataaaattgtatgtgtgaaaaaggaaaaccacacaaacggaatcttcacataaatagaatttggtcatatttgtggttgattgcttgtttgttgctagacctttgtgaagagtctggttgtttttctatgcatccatatgaagtaataaaagctcagaagggcacagaaagttttaagtgatttgagtcttagatataaaaatgaacttaggtataaaattgagttgtcgatgaactctgcttcatctagagcaaatctgtttttccttcatcttcttggcctcaagccatagccatagataccccattccagctggttttcataaaccattaagattcagtaaacaaataaagacctatcctatattaataataagaatatctaatatttatggaatgtttactctatgccaggccctcgtctaaagactttgtatctattaaagtcttcacaacaactccatgaggaaggtactcatattatctctatttcttagaagaaactgaggcacataaaggtgaagtcacttacccaagttttcacggctagcaagtgtcagagctgggattcaagccctagtggcctggctccagagtcaaaacaggcagtaggttaaatttattgacccttggtctagactgcattgttatactatatatcacggctgggatattttgtttcttctgcttaagacacttccctttgctttgttaggttgatgataacattgatgacaataacccttgctatgtttacagggtatttctatgtgccaggtgtagtgtttatgtctcaccatcattatctatgtcttcaccacaactacatgaggttggtattattatcccctttgtacaagcaagggagctgaggtcagcgagggaaagaaacttcaccatatagcaaatgtatgagagcagtgctgaggctcacaagcagaagtgtctgactccaaagaacctcatcttacctaccaagcacagttttgtaaaatgtgatttataaaccacctgcatcaggatcctaggcaagggattgtgaatttgcattttaacaagtttcctaggtgattcttaacgtgcattaagaatgtgatgaacgcagcattaacacaaggtggccaaccacttctgggatgctctctggaccctctaggccaagtcagaattttgtctgggtctctccaactcctgtgactattcatttcttactaccatttaccctgtattgcaattatctgaacaattgtctgtctcttccattagtcaatcatcctcaaaggttgcaaacagtgtctcaagtttactgttctacagcaacaatccatcatgtagttggagctctatgtatatttactaaataagtgaataaattaattaatagaaacactgactgcaggggtttttaaatgattttcataactagatttttgatgtctactgcacgatttgtattgtttttccctgaatttcctggtttttatttcttttgctactaatcccttggtttaatttgaagtatgcatccactccctccgtaaacaaagggttcatttttattttgttttgccttttgttgaatataactgaagagagctagggaatatggctgtccaatagaaagaatattctaaaaagaaagctttgtttatatgtaaatttatcaatgatcgtttattggtacttgcaatgatggtgctgagggattatcagagttcctccttttaaggagtttttaatatagttgagaaattaagacccaaaactctataaaatgaaaaagaatatatgtaattctgtgctaaattttattatactgaaacatccttttgtgtcctaagcagcttaggcttctatagaaaattaaaatagactgggcggcttaaacaacacgcatttatttctcacagttttagaggctggggagtccaagatcaaggcactaggagatctggtgtccagtgagggcactgttcctgatttgtagatggccatcttcccattgtatccccacatagtggtgagccgagtgagaacaagcccttgtgtcttttataaggacactaatctaatttatggggttctaccttcataacctagctaccttccaaagtcccactcctaataccatcacaataaaggttaagagttcaaccaataaatttgggtgggtgaaggagaaaacgcccaatccataacaatttgtttaacaaataaatatttattaagcatttatattttctagttactgttccaagtgtcacagatagagtagtgagcaacacagggtccatggaacttagattttaggttggaaagccataaaccagaaagacaatatatgaacaagtcaattgccaatagtggcaagtgaagggaaaagatcaatactgggtgacatgatggagtggctggggtggaatattctggaaagagtagttaggaatttctgggatgaaacttaagggacaagaaaaaaatagaatattagggacagaacattccaggctgaggtaaaatgaattcaagagcccttagaaagaacaagccgagtatgctgtaggacatctctggagcgtaatctggacaggggaatagtaggaggtagaaactgaaaggtaggtgtagcccggtcctacatagttacatggtaaggagttgggagacattctctatgtattatgaagccattggtgggttttatgtaggaaatttaacgtgttgtgttgaatatcttttaaagacaccctttgctgctgtgaaaagaggattgtctactaacaagagtagaagtaaacagaccaattaggaaggcaattgcaataatccaagtaaggagctttggtttgtgggagtggaaatgaagaaaagtgagcagatgagggatattttggcaaaaaatatttagaaagttcttttcaagatgttgttaatttgagatgcatatgagaaatcgaatatgtagctggacacaggagtaggatcctgtgaaaaaaaataagagcttggatacaatttggaagtcactggccatagaagatgtttaaaccatagggctaaatgagattgactaaggaaagaatacagctaggaaagcatagagaacttaataaccctgccctgggacaggacaacatattaagcttttgagtcatgctacagagagaaatgtgataatcctcagaagtcaagatgttaaagaatacttgatctggtatgtttaatgagttcaaactttcagttgctatcacttaagtcatttcctaaccaaagttcacttttcctaaatgtatatttttgtcctgatgtagcacaacctctattctcagttaagtaaacaggaaggaattgtgttgccaatgcccactatatatgttcatacatacatgttcatgacagccatagacacaccttccttaaagcccatccatcagttaattcagaccttttaaaatagttagaacaaaaatactttagaaaatagttagaaacaaagggccatcctgttttgtccataaaccagcccaaagaatacttacttgatgtcctcagagtccctaatgaggacagcagccatctggcaaacaacccattagattgaaactaacatgtcaacacaagcaaaatatgtgaagttgttgatcattgacagacagcctgttgatgggcatctatttagctttcaaagcagtctggcggatagattaaaaaaatccatcagacctgaaaagccttaacaggccaaatttccccagggggcttttctatatggtaccgatcattttcagagcagtgatagctctgattgtccccggcatcattagcctaaatagagtaacgatgccagggtgggcgagtcatgttaaacacatcatttgggacttgtgcgtgcacacgtgggcgtgtgtgcgtgctcgtgctttcggccctgtaacttgttgggggtgtgctaatttccatggcttcattagagcttttcacttggtaattatcttcctgctgtcaccaggtccttcgtgtgagcacacagagagaaccagcaacccccatatccacttgaaggcacgtgcacgttgtccagaatctcaccccacttccatcagccatcaccttctgccaagaaagtgatccttgtgcagtttctgtgcctgatgtaactgtttccatattcacttggcttcctaattgggcctcgtaccttttggagaaaaaaattgaggttgccgccagcttggcagaagctaaagtgagaagccatgcagatatggtttctgaagaagcaattgatttgtttcacacactacctaccttccttgaaaattaaaaaagctcaccgacaaagtggcaattggtcaggacctcaggagggcgaaaatacaaaaaaaaaaattaatttcaaactgtgaaactcagccagtgagagctaatagcctcactcccgacacacagcattcaccttctagtagactcaacacagccttggtgtgggtgcgtctgctgatttttttccttttttcttttttttaattgggggaaatctgtgaagtcatattcctcttacctggatttcatcactccccctacatggactaaacgtcatcaacgtcttcctaaaggacagtttgcaaaccccgtctcccattatttctcctaccactcttctaccgtggagcagacaacagttgttcccacagttctctctaatggtggaaacatagtaattaaccacatcctctcaaatgttggttgaatggctggcccctaatttgtctactttctgcagaggtttcagtgtctcatgaaatttattgccatactaaagtcaccttttaaattatggatcatgatattgttatgctgctaaaaatgttcacagcattgtaattttatgcactggcaataaacatgaaaaatgcattttgaggttgtttaacatgaaaaataatgttttggaaagtaaattttaggagaaatttagtgctggggaaaaggaccatattcacagtctcagagacaccgatccacaatccaaagagtgcattggatggggaccaaatctgcagcccagataggtcaacagtgtttaacttagcctagactggatttagagggtggtgggatccacatcttcctgccaactcccatacatcaagggctcccctttattgctctctaaacgatagtggggtttatttccagaagtggcaggtgattgccagacaattggcagcattgcaacaaatcacctagttcaggaataaaaataatatggcacatgatggatttctgaagagagctttagtttggtcaccagggacaacagcttgtggacttagcttcacctggaaagttaattcagtgactgaagccatggctatgacccttgactctactaatggatgtatgtcttgttaatggggccagtgaccaaccaggaacaagttatcttgacagacatcatgagtctgattacctgcgtctaaatcctatcacacgtctcactagctgggtgaccttgggcaagttacttatgcttctgttcctctacttccccatttgaaaggcaggaataatggtagaacatgatcccagggcggttttgagaattaaattaaaaaacacacatgaaagcacatgtgcaaggcacatactaaggaaccaataatattgttgataatgatgttgatgttgatgatgatgatgatgatggtgatagaatgagcccatcccacattgcactatataaaaactatataaaatggaagacagaagaaacagcaggaatggggtctagaaataataaatttgttctctgcatctgccctcctttctctacctggtaaaatctcactcattcttcaagcttggtctagcaggtgagaaaccttgctgtgtagccttcctttacctctcctgctaccttgtcgagggagatggaatggctctcttattggacatttccagagatttttcccaggattccattgtttttcattttgcactttattctgtatttaattgatcatgtgacttttttacattggacttcaagctgttctgcacattgactctatcttatttgtctctatgccccactgtacacagtgtcacttataaatcaatttaaaaagcagcaacatactttaaggtattgaaaatcatgtagaaatatagtggttatgtgggcgtggcggcgggtgcctgtaatcccagctacttgggaagctgaggcaggagaatcgcttgaacttgggaagcagaggttgcagtgagccgagattgcgtcattgcactccagcctgggcaacaacagtgaaactccatgtaaaaagaaaaataaaaaagaaagaaagaaaagaaaaagaaatgtagtggctatgttgttaatatttagataattatgagttcctttaaaaatattatcatgtgttaattgcccctgcccagcctgaaagatgctgtcttagcaagcatgctgtctgttggaacccctcctccccagcaaagcaaacatgtgaaaagttggcttactgtctacatgctttttttttttttgagatggcatctcgctctgttgccaccgtgtccggccactgtctacatgctttttgaaccatgtgggaaacaaataggaaaatcaagagcatgcaaagggatgcctaaccttggccaacattgttacttgggcctctctgaaagtcagaaatgggttgaattgccttccaatttaagacctctgtagaatctatacctggtttcttcctatattgcagaggaatgttaagaaatgatacctgtatgaatcacctcctgaccactatgggtttctgagctccatttggttttggctattaactccctgtcttggaggctggcaggagagttcacaagcccagatatcaactgactctaggaaaggagggtatgtgggaaggctactgtttcctttgttcatgatacagatctatagaacctgaaaaatattccaaaatcatcatagtgatatttttattaaatgacataatgaaatgatataatgatatacaaatgatgtaaatgccataaaataatataggttgagtatcccttgggaccagaagtgtttcacattttggatattttttggattttggaatatttgcatatacataatgagatatcttagggatggtaggcaagtgtgaacacaaaattcatttatttttcataaacatcctatacatatagcctgaaactaattttatacagtattttacatagttttgtgcatgaaacaaagttggtgtatactgaaccatcagaaagaaaatgtgtcactaccttaggttggggctcaaaaaattgcagattttggagcatttcagactttggattttggatttttggatttggattagggattctcaacctatataatgaaaatcttcatggttgggtgttgggccaaatgtaagacagaagatacagtgatgttgggttggggagcaagcaaacatctactatcacacttcagacaaagcaggcagaaggcggtctaacccagtctttctcaaactgcccttgaaacttgttcagaatgcagatttccaatgccaactcccagagattgtttcactgggtcaggttggatcccagagatctacatggttaatcagccttctccatttaatcctgataaaggtagtttgcagcccatacttggaggaagactagtgcaaggcaaatattttgttgttaggaaactttttagcatgcacaaccaatatgtgtttgttgataagttttgttcatgtacaatattacaatattatatatgttattaaaattcacaagatagaaataatacaagtatatgaaagtaaataaatttttgtgacttatggtccctggtgaatcttcttggacactccttggggtaaatgcaccccacttttgagatgcatgccctaaatcagtgcttctcaaatttgactgtgcatatgactatcccagagagcttgttaaaacgtggactctgattccataggtctggggtgggggttaagagtctgcttttctaacaaggtcccaggtgatgctaatactacccatcagggagccacactttaagtagtgaggatctatgcagtagcttctctacgactgacctaaatcccaatgcaaattacagttttaactgatcagggcaatgtgtagatggtatgcagaggccgaagatcatcaaccagctcccccaaaaaatgacaagctagaagatttcttgtaattcttttaaacttcactgatatggaatgggtaaaaagcaccctaaataagcttcctccaccccagccctttatgtgcttttctagaagggttcactcccagcttctctcttaaattaacaagacattgatccctgaagtcataaacagtgactttcctggatgcaagagtgggcaagattattctccctgattaagcctttgacaggcagcatctttgcagcaagcatcatgccaggttttattagtagattggccctacaaagtttttcttacctacggatgccctggctcagcaatccttcccatagattggaatgaacacatttaagaatgttgtgcttggaggtaccaggaaccataattagacaaatttgcaaatcataaagggataagtgtaatgcactaatctgtgaagaatattaagtggaaataggaaacttaaataattcattcctaaaatcatcccaagaatgctacgttcttccaggtgcatagacattgcaattaggttatggtgacaggcttacttcagataaaacaggaattcctcaatgtgcttgtttaatagacctgaaacatgttataaggaatgatttcattaccacatcttaccgatttgaatgaaatcacaactccataatatgctgccttatgagtaattccacagcatgccacagaccaaaaccttaggtggaggtggagcacacaatctgctgtgcatacagaaccaacatcagaagtcctctcagtgtattttagtaaaacagggaagcaccaggattttgcactagtcatctgcatgtcacttataaatcaaccttaagaagcagcaacatactttaatgatattgaaaatcatgtagtaatataatggctatgttgttaatgtttacatatttatgaattcctttttagacattgtcaggtactaattgaccccacccaatttgaaagaccatgttttaccaagcatgctgtctattggaatcccccaacaaagcaaacatgagcatttatagagacgaagctgctttaggtgtccatgacctatgtcttatacagcttggtcacattgccaagtctgtagacttcttgtagactaatttcccccacatacaatggggaaactaatagttattgtcctaaagaatgagattcaactccaatttgttttaaagaatataacaaaaaggcactccaataaaatagtaatttactagtttatttctagattctgcattaggtttttctatggtatttatatacagaaatatttctatcctctctccaactagattgtgttgtgaatgcagtattgatgaaagggaatcatttggtagacagtttccaatattcatttagacatgtaaattgagttaaattagtaaatgtaggtaaaatggaagctttgaaaagaccttgactgggggtaagaaatgggtgagaaataaaccaaacaggaagactgggccaggtgcagtggctcacatctgtaatcccagcactttgggaggccaaagccggcagatcacctgaggtcaggagttcgagaacagcctggccaatatggtgaaatcccatctctaccaataatacaaaaattagccggggatagtagtgcatgcctgtaatcccagctacttgggaggctgaggcaggagaatcacttgagcccgcgaggcggaggttgcagtgagccaagatcgcatcattgcactccagtctgggcgacaagagtgaaactccatctccaaaaaaaaaaaaaaaaagaagactgatatcacagaatgtttgccacattatgactgcggaagacatgagccgcacataccactggcctctgactaagaaagtgaggagaggtctcagtctaggtggaattgcacttaaccactcctggtttcactggcactggggcccttcagtaatagaaacatacaaattagaatatctacttgcaaatgaagcgaataataagtagaagggccacaacccactggaggagactagctccacattgggcaaacaaagttcaagaaagcaacaggaaaaattgtataacacaatggaaaggaaggtgttttgtgcgtttaacttcacctcttgtacctccagctgacttcggtgatgaagaaaataaactaagtaattttcactttcgctttgcctgacctgacccttagactgccagcccttcatagaaggaactggaacaaagtaggagagtccacatgtgtaagcttgtgagaaacaggttgtcttacacataacttatgtttaaacatttgttgacaatactgtaatcagtacgcggggtcttttatgcctctaagatagtgtttttgaaattctcttttattaagcctcacagtggtaataggcatgccatcaccatcactaccatcaccaccaaaaaagtccataattaaataagttgaggaattattactttccatatctctgtatgggatattcatttagattagcacatgagaactgagcagttctaccctcaagaagcatgtttcggtttttgtttttaagctggtctagaatttctcaaaaataaatgaccacagaatgctatcatagaaaactactagctttgttttacaggaaactagtgtctttcctcctcctcctcctcccctgcaacaatttctctattatgcctaagaggattggtagagtcagccctgtaatgtctatgctcaccaatccagcttctactgagaaatcctgcatgggagaagagttcttgaacttgcagccttggtaagtctgacagtctggaccttattatgctagtaatcattttaaatatctttattaatgctaaattctgatggagaggtagaagaaaatatcagaccatatatcaaaaacatacatgaagcaaaatctgacatcatatgctcagtacgtattcccttgtacgagcaagagacggaactaggttcaggagttgaggtcttcagaaagaatcagaaaaggaggaatgaaggtggatattctgaaagacccaactgcacatgaatgccagataatttctcttatttgatattggctgctgattctaaggtgaactaagttttgtttttattttttccatttttatataaactcttcattttataaacaaattttggatttatagaaaactgaagccattatagtacaaagtgttccttcccattcaccccatacccagtttctcctattattatcatctgagtataatacatttagcacaaccaatgaaccaatattgatatattatttttaactagagtcaatggtctattcagagttcctttgtttttacctaatatccttcttctgttccagaacccaggatactgcaatacacatagtcattatgtctctttaggttcctcttggctgtcacagtgtcccagtcagttgtgctgttataaaaaacaaacaacaaacagacaaataaacaaaaccaggagactgtgtaatttataaataataggaatttatttcttatcattctagaggctgggaagtccaaaatcaaggcaatggcagattcaatgtctgatgaaatatctctgcaaccaagatggtgcctccttgctgcatcctcacatggcagaaggcaataaaaggcaaaagggcccagctacttccttctcacactttgataagggcattaatcccattcacgagggcagagtcctcattatttaatcacttcttaaaatgccccaccccttaatgccatcaccttggtgattaagtttcaataagaattctggaggggtacaaacattcaaaccatagcaggccatttctcacagtttctcagactttctttgtttttgatgatcttgagagttttgagaaatactagtcaaatattttgctgcctattctgcaattgggatttttaaaaatgtttttctcatcatgacactggggttgtatgtttgggggtggaatatcacagagatgaagtgccaatttcatcagaacatatcaggggtacatgcttttatctagagtcaatagtttgtgactcatcaccattgatatcaaccttgtgcacttggtcaaggttgtgtttgtcaggtttctcaactataaagttactcttccctgtcatccctttttcatgctgtatgcgttggaaagaagtcactctgtgtagcccatgccaaagcaggaggctcctcctccttgatggttgaatatctatataaattatctagaagtattctgcatggaatattagtcaattattctgcgcatgcgtgtgtgtgtgtgtgtgtgtgttgtgtgtgtgtgttacacatccaattatttgtttttatcagtatggacttatttatatatttattttatcctttgtgttgtaatccaataccactttatttattttgtgttcaaatggttctaattgtggccattgggcttgggggaagtacagtgggagaacttcccctcttctagctggaatagagcttggcaaagccctttttcctggagagtaagctgttgttgttgttgttgttgttttaatggagagcatgtagggcttacttcatagtgattgctattctctccctctagggagagccagaaggaaatctatgtcagaccttcaccatgagaacctgatgtggttctggttcttaaagatgaaacccatgatggtgtgggggctctctcctaagacggagtccacaggagttcttaccctcttactagtccacactcagcctccagcaactcctaaaaactagcatttaactgctcctgccagtacttggcccttgccgctttggcctctgggtaagccaatctcagctctgactgcaattgcctgtctttccagatttcacggtggtggtttggcctgtgacatcggtgctccaatgggtccaaaaaaaattgttgatttttagtttgtccaggttttttgttgtatgggtagagttgataattctcaagttatttagatatcagcactgaagctggaagttaagatgagtgtttttaaaaaagtatttggctttattagacatgagcatgctcgtataagagggcgtggttcatcagaatgagcttccactcattgtcaagggataaagtgccttcaccaagtcatgtcactaaagatggtggtgcttcaacacatactgaaaagtcatatgcatagtgccgtatctctatgctcataattctttcaaaagaaaatgcataatcatgttggtgggttttaaatatacctgaagttagctgatacaacttaatgactttttgcagcccagtgatttataccttagcctggcatttgggaaaagacactggctttgggtcaatcaagtggttgtgggaacaaatatgtcatctgcacaggagcaaacactgttcctctgaattttctctgcctattgaatggcacagagtcttatatttgggataaagcatggactctggaagtttctcagaaacttaactattgagaagtatatggcattaaatggtgaacttgttttattatgacagcttgattagtgtatttcctgggcttcagttctttcaaaactattttcaaattttttcgacatccacatgacattgatactagtcatccctaaataatttgttctttgttttcataagttttctctgaatcagttaaatatacttaaatatacttgttaaatgtgaaaccacacttcaaaatcttgatgctcttgttatatggttgatcatgcattttctttgtatataaatatacacctaaggtaatcacattcatagatttatatctaaatatcatccaatgttgtaacaatgatacgaaatttaggaaaacacaagaactgtttaaaaggttatttagctgaaaactgagtcccctgaggatgaatacaagataaacaagttgtaatgagtggagtggataataggggaaaaattggcattgtgatattaatatgcttgattgggacttcactgtacatcttggagagaactgagatggcgtttccctgactgaaatgggatcaacatgaggaaatccatgccactacatatttgtgggaaatgaccaaaacggagacataattgtacctttacatctctcatgattttgactaaagctcatcttttgattgcacactatgtactagaacacttgctaagaagcagagagcttcttcctgttacaataatgatggacaaaaatgagaataaaaagtataaagatattttggctaagattctttgctctgttttcattttttaaaactggagtctaggctaaattgtgctttggggatgttggttcacctggtagcaaacatgagttaccagtaatccaccactctccatttgttgtttcattcaatgcatatttattgagcacttgacatgttttagattttgccataggtagcaattacccaactgtgaaaaagacagatgtggtgatccacaccattgtggaggttacagttttgcataaaagacataatcagcaatatcttctctttcaagttgacaggtggagtgcatgctacaggctaaattcttctgcattaagtcctcagaaaggtagaaaatatgattttttaaagacaggaacatgaaatattacctacatctcacatgaaggtaagaaatagtttgttcttacaactggatttccatcaagggtgtttcatgctcagaggtggaaaaagaaaaagagagaatcgatggtgaaatgacaaggtaattcattggaggaccaggtcaagatgactgacccctgcaactctccctcttagaccaggcaatagctggaaagcatctgcctgcaggttagagcagaggacacagagtttcactcagagtggtggggagtactcagcagagcaggtacagaattgcctctgctccccagctctcatcaaaattaaagccacaactccaggtcctacttcaataggtagcacaagcaaatggataatctcaagtacaaaaatggagaacaatcactaatcatcatttgaggaatgtgaaaaccctaaaacaaagagaagtagaacttacacctgaagaaacagagcgcatagagcaatttaagagcttaatggcaatgagaaaaatgcaaaacaatcttggtaaagagaggaaggaaagctggggaagcatgttctaggtagagggagcagtacatgcaaagacctagggacaagactgagtgtgaatcctcggaggaactaaatgtccttttgtgtatctggagtaaaggtgtggagcagatagtggagaggtgaagtcagcatggtagagagaggccagcttgtagatcttttaaaccacatttaaaattcaaacttaggggaacaacagcatgtcatttaaggattttaagcaaagagatgggagtggccttgattgaactacagctgtagatcaagagtcaacaaatattttctgtgaaggaccagataaaaaatattttaagctttgtggctcataaggtctctgtacaactactcaactctgccacggtagcacaaaagcagccatgaacaatgtgtaaatgaatgagcatagctatatttaaaaacagactttacttataaaatcaggtagtgggctggtttggccccatgggccaaattttgctaacgcctgatatagaagtaataaaagagaaaaagagagagagagagattttttttaatccttttttttttaacaaagtctgaaagactggcatcagaaaggttggaactgtgtttgcaattttcctttatttcttatgctgacaggtttaaaacccgagaaatcttgcattctacatcttagcctcattgcctcctgtcacctgagtaacacctttctccctgctgccaaaatggccacttctgctactgggtcagaccaattatttcctaaatggtttgtattcatctgcacttcaaatgcattgctttgagggggggatataatcctgtctggcactcattctactccgcacatccattatgtgagcaacacatcagtctgctgaattaaagagcccatgactacaaagcaactgtatatcatgtgtattgccgctttgccacaggcgctattcaaatatctgactttgagagtccttttttgcttagctaggtacttcatgctagtttaaaaataaattgcaaaaagtatcaacagtattctttaagtaagtcttcccatattcattcatatccatattttacagaaattgttttgaaataatttctttctctttctctctttttttctctctctgttgcccagactggagtgcagtggtgtgatcacagctcactgcagcctcaatatcctgggctcagttgatccttccgctgcctcagcctcccaatcaagctgggactacaggcatgtgccaccatatctggctaatttttgtattttttgtaaagatggggttttgccatgttgcccaggctggtcttgaactcttgggctcaagtgatcctcctgcattggtctcccaaactgctgggattacaggtgtgagccaccacacctggcctctttctcaagtttcatttttaaattgcctttgacgtttgagtgttaggatgatagtcagattttggcaaaaatggcagttagccttagctactgcctcttgaaactctcctggtctctctcaattcttttagtaagtatcaaaatgatgattaaaatgctaagaataatagttaacatttactgaatgctcactcagaactttccttgaagtatctcatttaatttcaccacaagtctatcaagaaattactattaaaggctgggcgaggtggctcacgcctgtaatcctagcactttgggaggccgaggcgggcggatcatgaggtcaggagatcgagaccatcctggctaacacggtgaaaccccgtctctactaaaaatacaaaaaattagccgggcgtggtagcggatgcctgtagtcccagctattcaggaggctgaggcaggagaatggtgtgaacccgggaggcagagcttgcagtgagctgagaccacaacgctgcattccagcctggggacagagcgagactctgtctcaaaaaaaaataaataaaaataaaaataaaaaaatacataaataaaataaaatgtacatgcttcctttcactgtgggtccacacatgggctccttacatcctcccacacaccaggatcctgcatagcaacaggatcagtcttgcaattcatgtagaatgcgggtctaggtctaggtgggtggattgcagaatggagttcaaatccatatgtggtatctctttatgtggggaaaacaagcaagcaaacacacaaagaaacattagactccaaaggagccttccaggaatttctgaaactgtgtaagtcctttctgctttttccccatcacttcacacaacctctcgccagacacctactgcaaatagtaagtgtgaaacagtacagcaataaaaagaaaaaaaaaagagggaaatgctgacacaatcagatttttatgctaaattgtatttttttgaagtgactctcatcatttctcattgcccattttaatctccatttgaaactgtcccgcacagcagctttttataagcaggtggtctcaggaatgctactttcacataagctatgcggggacatggattcgctggtcaaataaatttcaagaactgctgtgtattctacctccctcttggagagttacaatgtccatagcatacttcacagcctgggattccctgcattttccaaacttccatgactactgaatactttcatggaatacttagtaaattcctagggaactagtgtttgcagaatatggtctgggaaacagctcagtaaaggataaagtctaggccatcaaacacaggccttatatgatttacttatctagaatcagtctctccaacctcaatacttgactgactttccctttcttctatctgtgtcctttgttgttgagttgtttgtggatgcaaaaatctatcttttgcctctaatgcttgctcatggctgtgttttctgcttgctagccacataaccttggctaagtcacttagcctcacgggggcttcagctgacttatttgtaaagtacagggtgtaacaaatgaatgattttttggtgtttgtttttgtttttgagacagggtcttgttctgtcaccgaggctggagtgcagtgctgcaatcactgctcaccgcagcctcgacatccctggctcaatcaatcctcccacctcagtctcccaagtagctgagactgtcgtatcaccatgcctggctaatttttgtagaaacaggatttcactacattgccctggctggtctcaaattcctgggctcaagtgatctgccagcatcagcctcccagagtactgggattacaggtgtgagccaccaggcccaggctgaatggtctttaagatcccttcacaatccatcttttatccatcttgtgatttcttctcctcactggtccttgagtgcactacttgctttctctaagcctcactttatttgtctgcaaaatcaggacaataacagaacatacttcatgggattctgtgggaagaaaatggaataaggaatacggagacttgttagtacagggttatcaatatgtcccttaacaaaaattaataataatccctatctaccacttataagaaaattattccagaatcacctagagctgtcttccttgagaatgatatatcctatgtgctctgtagctttgaaagcctttcacggatgtaaaaataacccttaaaatgttcttaacagtgtaattcaaagaacgttaatgtgctccgaggccaaatagagggaaactcaattgctataaacttaattttcaagcatcctaaataaatatgcattttccctgagggcaaagagtcaactctcatcagactcttgaagggcagaatgtgtcaggacatacattatggtcttccaggaaattggatagagaaacttaaagccctattaagtgatgtgactttgaaaacaacatctgtatataagagactttaactctgtatataagagactttaactttacaaggtagttttccttcatgagcttagctgatgctcagagacaggggaggagatagaatagctgtgaccattacctttgggtgcagtccaactcagtatgtccaaagtcaaacctgctgtcttccagttacaaactggactctcttcctgtctcggttggactctgctatttaaccagcttaaccggctgcccaggccacatacctgaagtcattcttgctgttccttcttctttactttttaatgtcaaccagtcttcagctctctcaaatccagttctaaaacccctgacatccagactcctaatcttcttcactgaacttcctttaaactctgctctaccttggttaattaacaatttcaccctttacactgctcagaccccaaacctcaaagtcaactgattctattctttgccccccgctccatgtccaatccatcagcaaaccatgaaactctccatcttcaactctgtgcagaatctgactactgattctcccctccaccgctcccaactgagtccaaaacaccttctcaagtctacattttgtttgtttgtttgtttttggcaacttcttaactggtcttctgcttgctgctcattttcctatagagcaaggtttctcaactctggcattactgacatttgggtacacataattctttgttgtgagagactgtcctaggcattgtaggacgttgagcagcatccttggcctctacccactagatgccagtagcacccacctcctcaccaagcgtggtgctgaaacccccataggagctcctcttatctctcagaggaaggttctctagttatgtaagtggccacaatcgccgcactgtcaggcctcccgttgctgttctgaactcactttcctcctctttctgccttgcttatcctgcgtgagccacaccagcacactgggtttgttcccagcaccaagcctttgcacttgctgttcccccccatctggaaaactgtctccacaggtatccacttggtttattctttcatctccttaacgtggcacctccatgtatttgtataaagctctatattgcgcccagccaaattatgctttcaactaacattttatgactgaggtgtatgttcccaaaacattgttagatgaaaaaaaagatgtgaaaaaaagcatctactatgaccctcatttttctaaaagaagcatcaaatgcctatttatgaacatactgctgttggtaaatacagaggaaagaacaccagaaagttagacacaaaaatgttagctgtatttatctctgttgtagtagctatataaataatattttctgactattctgctgtattgtccaaatttctatactgaagatgtttttatatctaacaaaaacaataaactctatttaaaaatggaatggtgtcacaatcctaatatctctgagatccaaagaccaattgggaaaatatggcaaggtggagcatggtaaatttgtgtgtctttctcttttaccctggccttgcagcaccgttaatgaaaatcaagggcatcttcttagatgctttaactgagagtgcaaaagggaggggggaactgaaataagtgacctagaatgtttacatttatgaggaccttggcaatcatggaatatgacaccttcttttttaataaggtgggcgctccagagaaatcaactaacccaaagtcacatggttaaatagtggcagagatgggattgttcaattattttttcatcaaacatttattaagcttccactatatgctgggtgctaggggtatagtggtgaaagataaatataatccctgctcttaagtgcagtggggaagaaacccataggcacaaccaaatagtgtagaaacgtgtcatagctatggcctcatgtggctgtccagcacttgaaatgtggctggtttggaccgagagctatgaggcctggcgaggtggctcacacctgtaatcctagcactttgggagtccatagcgggtggatcacctgaggtcaggagttcgagatcagcctggccaacatggtgaaatcccatctctactaaaaacacaaaaaaattagccaggtgttggtggcaggcacctgtaatcccagctactcaggaggctgaggcaggagaatcacttgaacctggtaggcggaggtttcagtgagccgagattgtgccactgcactccagcctgggcaacaagaatgaaactttgtccgaaggaaggaaagaaagaaagaaagaaagaaagaaagaaagaaagaaagaaagaaagaaagaaagaaagaaagaaagaaagaaaggagggagggagggagggagggggagggagggaggcaaggaaggaaggaagaaagggaaagggaagggaagggaagaaggaaggaaggaagggaagaaggaaatgaattgagggatatgtaaatataaagcattcactggaactactgaagggatgtaaaatatgccattagtatttttcatattgattagatatcaaaatgatattactttggacatattccattaaagaaaatatgttaaaattagttttacttgtttatttttactttttttaaatggctactagagactcttaaattacacatatggcttgcatccatttccattggacagtgctgcatatgcaccatgatgtagacttgctaggatgttagaaatgagagtagacgatgaggaggttcagacaaagttccttactcagtctttgggacagagaaagcctatgaaaggaagtggcagataaattgtaatctgtatagtaagtgagatttaggctaagaacagggtaaggttggagtgcgggaatgaaatcaaaggcaaaaccaagtatttagggaaggtcactagttgctaagtcaaactctttcctgattctctgttttattaatttgcaagttgcaatcatttaaaaaaaaaaaaaaaacaggctgggtgcggtagctcatgcctgtactcccaccattttgggaagctgaggtgggcagcctagccaacatggtgaaactctgactctactaaacatacaaaaattagcagggcatgatggcgggtgcctgtagtcccagctactcgggaggcagaggttgcagtgagccaaggtcatgccactgcactccagcctgggcaacagagcgagactccgtctcaaaaaaaaaaaaaaatttctcttctaatggaagactttgacagatccttaattccaggcttgagagtggatgtgtggacttcagggactctaacttcaccaacattgttctccttccactaatatcttatgggataagctcatttcagggaagggtaaattctgcctggaccagagaaaaataatgacattgaattagctagatagatggcaatgagtaatccgcatgaaattcttaaatttggactgggaagggagattcagtattggttagagtgtctctgattttgcaattcattctcagccaagaaaatgaatgtgctctataaaatatttctggaataaccttttagtgaaaaacaatagaaatttttaagacagattaaggtttagtgtcgcagaagattatagtgtgaacagactgtcctcacaggggcctgtttaactgttgacaagctgggggaggggagaaccataaggatatttgacatgaaaaatgtgaattcgctctctgagtgtttactagcattcacaagtagcaggaaatgagccgtgaaatgtattgtcaaacattcagtgttcaaaatataatgcattactttaagttgggctttttgctttctgagatcctcgttctcaatttgcccacctctaggatagatgagctggcctttaatcgtgcccttcccaaaccataatgataaggtgtagcagaaactgggaagtggctttccaaaagccagtcacaactcccttttccttgcctctctggattgcagaggcttggaaaacacagatgcatgcccctttgcagttagtagttgtcgcgtggcctactttggcccagtgagatttgggtattagtttcttgggagaatgttcttaggaaataaatgcaatgccctgctaaaagagaaacccacacccttcttcttccctcctccttccacctgaattctagaaatgggacggatattcagctgctaccacagatacggtggtgcagttgtgaaaatgctgaaagactttcccatcagttggtaaatagcaactttcctgaattccccaagtgtccctctttgtcttagtgccttgcccaagccccctggatctccctgtgattctaaagggaaaaactcctggaagagcaggggcctccagatctgtaccatttgtgaaatattttagatatcatgtcctcctagaagtgagggaggccaccttgtaaccatgaggtctcctctaagcacaggatggggacgtgatgaagccacagtagcagcccaagacgtactcctgcctggcagcagccattgtggtatggttttctcttactccatctctcacatctgaaaaatatattgttaggtttgatagttaagcaagaatatttctcaacctggctttgctcagacacactgatgtgtgaggttttttttttttactgtttctacacagatcttttctttttgatctcactgtcctttctttatggtcttcacctttaagatccagccttctctgataaccctagaatgtgatgttcagacaatatttattagaggaataaacgaatgaataaaacaaactaagattaactttaaatgtaaaacactcagagatttttctattttacatgtttggcttttataattcatttttgctcctctaattagaatctaagatattttatttcccctttctcatctttttctttctcccttccttccttctttccttccttccttcctcccccttcccttcccttccctctcctccccttcccctcccctcccctcctgtccccttcccttcccttgccttccctctcctcccctcccttcccctcccttgccttcccttcttccttctttcttccttctttcatttcttccttcatccattcatataattaatatttatggagtaactaataactcctgggtgctattctaggctctgaggatgcagtgatttatgaactaaacagctctcaacttcgtggagcttacattctagtgtgggcacaggaagacacaagaactaacaaagcaatcaatcataatatcaggttgtgataagtattataaagaaaaatagaaaccactgttaggggataaaaagtgatagaactgccatttgggatggaatggccaggtcactcttgaaaatggtgacgtttcagccgaggcttgaatgaaggagtctagcaagggctgaagggaagagcaattcaggcaaagggaacagcatatacaagggacctggggtgtgaacttgtcgggcaacagggagcagaccagtggggccaaagcagagtgaaggaggaagcagagggaggggatgggtttggtgagatagtcaagggcttctcttgcacctttcttctcttcccaactgttatcattcttgttgcacaacagaaatttctggcaaagagtaagccaacaggtaagctcagagataggccactctggttatatttcaagttctctagctcctgcccctgggtttgcctctttggattgccagaaatactgtacaggctcaaactcttgctctcaatttaaatagtctgcaagatatctctgggcgtcttcttatgggtagtggtgcccatttttctggagtctatacctatgttgtgatcatttcccacatcctgtcattatttgactctaactcattttggggttcattttaaatttcattagttagagtgccagtttcaagcagcagaagttactcaagctctactgtagatgggtttatagtaagcacctagcatagtctgtttggagtaccagttcgtagccctaaacctatgtgtgaactttcacatctggccataagcaattattaataccaggctttacctgtcagacctcgtggggagaaactgccctccccactgcagacttggggcacagccgacacattgagtctctgaggggagttgcagtcaagcactgagtccccccagccagccttgctcttatgcacatccacattcctggcccaggtgcctctctttggaggcctctttatcacaggctttctgcagaggcttatcttagacacctctgcaggggtcaccttatcaaggagaagaagcggggaggcttggagatgtttttctccactctgactcagtgctcagtactttcacactcatagcccttccttctccccaccccccgccagctccagatccatttgatggcgggagtctcttgttcaggggtccctcagctgtgagacaatcccttggcttcagtgctgatccagaccctcaatgagggctggtgcgctggggaaaatggaatgatggggagtcggcactttctctggtttagtctcttgtgcatactattgcagtaaatgattaaagccttcactgttcatcttggcttgttgtcttaatcagctaccctgacacctggcagctcagctctctcgagctccgcttagctcctgacagtctggtggagtgatatgaggacaagcagtcacctgagcctcagaagaaagaagaatccagcaggccgccattttctcctcagtgcccttggcacaacgtggctgcctcagacccccagctatgtatgttacagtatcggccccatgaagagaccacttgaataaacacagaccctttgttcctaaatgcaaattccatagtgacaaaaaacacaccgggtaagatggtcacttatgtttcgatcaaccacggccagggatggactgggggagggcaacttcatttgctgcctaacagtcacaatgttagttttcaaatgcaaaacagactatgttaccctcatgattaaaattctccagtgtcttctcattgcatttatttaaaaaattcaaattcttttccatgtcctgaagaaccctgtctgacccagtccttcagatctttcctgctgaacctcacacccctctcctcttccttattctttttcagccttgttggcctttttgtctgtcccttgacctgagccggtcttgttcccagctcacaggcttcatgctggctgtttcttttgcatgaaacgtgttgccatgtgatcttggcattgtcggcttcttctcataattcacatgtcaactcccatgaatgtcccagtcctggagaggctatccctgaccagccagccactccctatcacatgatcttaaaatttcttttattttggttttgcatttaacatctctcattcttccccaacccccacaccccatgagaaaatgtcagttccacaagagcagggatttggggttgtcttgttcactattgtatcctgctgcccagaactgtgtctggcttatatcgtgtgattaatcaatagaggttgaaagaataattgctgaaaccccactcttgcccatgagggtcagtggagagctgaatcacagagaaagaagtcattggttcttgggtgggaagtcacgacatcggtggaaggcagtcatccacgacattagacactattaactgtgtcagtatttctaaaagaactggcaatgagtgaattccaggaagatgaataaatgttcttcgagaaattggagatataagattcatcttcacattgcccctaccggcctggggacattcacttgctgaacaggaaacataggtagtgtacacataaagctcaaagctgttaagtatgccacaattagttcttctggttagtttatttcagtagaagcttctttgaaatgtgattcttctctccctcttatcctcataaaaacatcagttatgcacatagaaatgccaatatttccatagccatcacttttttggtaccaattaagatgatttgctaagtgagttttacaaaatccatggctatgttggttagttagatgggagtcagaccagataaactgaaataccaggttttaatattcaactgtaatttcttcatgaaaatataaaaatcattccactgaatctccctcaacagaagctggatgcattgctgatttctgcctgcttttcatttagtatctggcaaatgtaaaaacaaaacaaaacacgtaatatgttagagagatatatatatacaatctgcaaatatgcaatatacagatccctaggtatctgtggaagattggttccaggacttccctcagaaatcagaatctgaggatgttcaagcccttaatataaaatggtgtagtatttgcatataacctctgcacatcctcccgtataccttaaatcatccccacattacttataatacaaatacaatgtaaatgctgtgtaaatagttgttataatgtattgtgtagggaataatgacagtttttaaaaagtcgattcatgttcagtacagacacaattctttttagaatattttctatttggggttggttggatccacagatgcagatcccaggcatgtagagggctgactgtatatgtgtatatccatacacacactaactcttcataattctgcatcttacattcctatcctcacagagaatttctcttctgtgtatggaaattagtaagggtctcacctatattttactagcaatctctggtcattatttactgccccatatcataaatgtctcatgtacctaagtgatttgcgcttgatgttcacgaagcctccaactgccaaccacttcaggggtgatggcatccccatttgctaagcagctttcacactcattggcctctaaaactgagctgttacctaaatcattgccctgctattgaggtgggtggttttacgatgaaggtgatagaacagaagccttagcggatgaatgttcccccatctttcctttgcaagggaaatgcatgctcttaggccgttgttctcgttcttttggaggaattacaaatttaacagtgaaaaacaaatgaagtacagcctggtgataatatcttgtgttagtataatgctttttgactcacatgagtttcctatgtataaacttacttgatcctcataagaaccctgcaatgcaggcagaacaacaatcataattgcccttttacacgtcggtaagagagactcagaagagccaagtgatttgcttaaggtcacacagctattaagttgcaaagccagaaagagaaactcaaccttttatgagctcctcatccaacaagtttttcactagacccttcatgatactttttgtttgagcaaaaggcacattattttcccatcattaccctaattgcaaatttgctagcgtaggaacacattctttctgaaacctgaagtgccttttcataacagtgtgcagcgttttagtttctaggggatagctggccctacctgcttcatttagggctcagaaggctgggttgggagaggagatgtagtctgctcattatccttccctttgtaaggatgtcagcagcaacattaagttgcaaatggaaaacacaaccttggcttgcatctcgtcctcattctccgcagagttgtgtataacccagctgactgcattacccaaccacgccccctcctgtacattacccatcagcaagtgcactgcctctcttcagctgggctttgtctccgacggcattgcattgccttctctttcacaagaggccactgggtgtgaagggatgtcagtgtgcagctacctccagaacactacaggtgctcttggctttccctctttgcaaatttctcatgcatttcttccctgcaaaaagacaaatatccaacttggaaatggaactcaatgtgaagttagggcaatatgagaaggaggagcaagaaccaggaaccaataggagcagaattctttgagggccaaggtagcgacccagtacaattttaaacacttaaaaaaatccatgtcaactatatatcagaaatgaatttttaaaaccttacactgcccagggctgccaatagcaaagagtccctcagggccaaagcagtttagcctacagtgctccctaagctaagaaaatcaagtgtctaaatgcatatcttcactcccctaaaaatggaaggatacgtaagccaacttctatttttggtcatccctccgaagtcagtcaaatatgagttccagttttaatgtaacatttcttccaataaaaaaggtacttctgctgttatcagatgtatatgaatatagaaatattaataatttcaagaattacttgttggaggcctatctgttccaaaatatattttggaatctaagatcctagtattttgggagataattcattaaaattacttttaaaagtgaagtgagccatgctatgaaaatagaagatgcaagatcattggtgttgacttcttcccttgataagtgttttgttaagtgactgcttcttggctactttcattatgatggagggattgcaaggtcccccaatttcactaaggctcttccatgtatgaaaactggtgaaaatgagttgatttattgtggtgatactaatagcttgtgtcagacaagagttcagatgtgagtggctgagatcgggtaagggatgtgaggaagggtagactaccaatctctctcttcaagaggaaaggggaaaacataggttttcttccatccttaaacacagtccagactcctggctcatggtcctctgtggtttaactataccttgaccttcctgccttatatccccacctcccccccatcaattcctgatcaatcttttgccatatcctttgcagaccttcctgtctgatacaattaatgattaattaattgacatcaaaagtttgtgaacattaccttagtcagctgtcttgtgtgcccacctgcataggaggtacatgtctagtgactggaacgctgtgtttgccccatcatcatccattcaggaaggaggacattcctggttgaatccacgctgccccatcagcaagtcgagggtgtagcatgtgatcataatcaactattttgtaaattttgaagctgctgccatatccattctattgtgaattgctcaatttctcagtacctacctgttgttaatcataaaagtttgtcaaaatcagaaaaatgatcttatcaggaaaaggaaggaaatgactgctttaattcagtgaatgactagtggtagaaattttgaacaaagtccacattatttttacatggtgcatgaatgttaagttatgtatagttgcaaaatctgcctttttttcttccttcccccctcccttcctttcttcctccctcttttcctttcttcctccttccctcccttccttcctttcttcctccctccctcccttcctttcttcctgcctcacttctttccttctttgctttctttccttctgtacttttcccttcttttcttcctttcttcattttttttccaaattatttgtaaatctccagcaaggtattcttattaacaagaaaaaaagagtactggacttaataagtcagaaggcttagggtttgcaactcaaggcccatgctcatgaatgacgttggacaaatcatttaaattctctgtatatccttgaggatcatccccatcttacagatatggaactaatgctcaaagagggtcctgtagccaaatgtggcatacctggcaagtgtggagctagacacaggacttctggcaccaaactccatctcttaatccccattctctaatgagagtaaagttagggtaatgaacactaaagacctggactcttaataaatagcacttaatccatgttgaaccagataccttccccacctgcacatttccaggtgtgtttccacatcattgctcttgtgggtgttgtctgagaatttttatttctccatttaaagccctctggatcaggtgtttgtctgcatcccaaatgcactgtcttcaggaacggtgcatagagcaaggcagatggagcctgtggcactggagccacccctgtttcaactgtgacattcccactttcctctcttttacctagtgggtttctacacaaaatttaacttgaagaaagccagcttctacttatacaaccccctacacacacaaacttatttgaaactcataatctttggccaacctttctatgttacttaataaaaatctgaaacctgagaggtaactagagaaagagagtaagatttggaaactagaaggaacatgccgataatgtagccagggaacctgaaccaggatcagacactgatgccatttaggagtgggcaggctaaataacttgtccttcatgtctggactgagattccaaatggcaggatcttggtgatcaataacaggtgttgtgatgccaggcacaggtgaaaattttgctacttgagaagggtctttcctctttgtttactggatatatcagtgtctctcacctttttaaaaaagtttcttaattctttcggttcctgaaaaagtgattgcattcttgagaagaataaaaaactcaagaccatgctaaaatagacagttaataattacctcttgattatcactccagtacaccatgcctctctctgttactgttattcaatttcccttgccaccttggcactgtgtcactcatgggtagaactgtttgctgctctgagttctcttataaactcatgagacaaagttttcgaattttcagtagaccctcttcttttcacaagcttaactctattctaagcctctaacttatcacattatttttaaacaagtcagattttcacctctcacataacaaaaagtctggaggtaagtggctaatgaaccatggctcatggactcaaggatatctggcatggaagttagagtctctgagatggccttcctcttcccaggtttgagtataagatgttagccacagctccaggccgcacaccctcaatcaaggcaggcagaacggggaaggggcctctcttacttattatcactgtaagttgtactctgctgcacactacagtggacatcctttatactcccttgttgcagctgacagatacatatacctaagtgtatgtgtcccttggtgtagcaacagtaaattttacacatcagtcaacattaagcaatccattcatgccccagaacatcactgcttatatcacagtggtatttcttattgtcctgaaagtggagtgatatatgtgactcactccaaaaacaaaacaaacaaacgagaaacaaaggaaggccaggcaagtttggggatgcagtttaggttcgaaagcctttgcatgagctggttcttgttgactcctctgattcaattcttatctttcctgtagtttaacgccattttttcacaccagactgcttcctgcccaagcttgttcttgtcacacagtctttatacctgccatccccatcgcttgaaatgtgcttccatgactgtaacatgactggcactccagcatacattctcagctcaggtgtcacttcctctgggacactctctgtgactataccatccctaacttgcactcaatcacagcaccttggttcatttcttcatttcaccatgtgaaattttcttgtttttttatttcttctttctgtcattcctactagaatctaagttagatgactgctggaactgtgtctgacctattattattcacctcaagcacttacatgagcacctaaacatgggttgaatgcatgagaaaatgaaccaataattgtcatcaaggagatgcccaaggttttagatgatttcaggaaaggtggagacttcttgaagagcagcatttatttatgaaaacacatataacacccactggccataacaatgtgacaaaggtcttaggttaactcactgctctgcctgtgctggtcaggacaggcttaatacaatgtcctttgcagaggtgggtggagcaagcctattatttcagggtccttgatgcagccatttgagctgttcttggcagctagtttatgtattcatgatttaagatagaatgacaaagccatttatatataaagaaaaaaaaatcctccaatacttttcagtgtattgtcttccaagagaacccttagttctcactacctgccaaacaagagctagcgccaaagagatgtagaaatcaaagactcaaaaggagtcatagaagaaaggattagaatggagcagcatttcctgattgcagcactgcaggcacaagcttttctctactttgttctttttggtgaagacaacgcaagggccaaacaaagatgctgtgattcattgaaaactcaaataaaatggcaagtcatttcatccagagtagattttctgacagtgatgtctttctaatcacgaaacttttaagcattttcaacaagccaaatgagctcttcacagttttgttacctgagcaattgtccatttatgagtccctttccatgaagaacatgtactctgtatccctgccaatgtgccagaagcaaaaggcaacatgcctccggtgtggcagcaaaagccaagagtaccggccatcttggcaaacaaagagctattgtctatatctacgaacttattagcatttggtgccttcattgagccacaggtgagtggccatgcaagcgtccatacgtaacaaacaaaaagaacaaaacaacaccatgtaccttgatttcttcttccacacccgtttatgcaatcaatcaactttcacccaagagcactttacgacaaaacaatgtcctcaacaaaagcaacaatagtatgtaataaaaattgagctaggactataaggtgttagcttacattaaagggaaaagttgaaaaggaaaataaaacaaaatacaaaccatctgtaatgtgcttttgagttccagggcagagaattccaaaagcaagggtaattcttggatgggagacccagtaaaagtgacaagattagccgggtgcagtggcttatgcctgtaatcccagcactttgggaggctgaggcgggtggatcactgcaggtcaggagttggagaccagcctggtcaacatgatgaaaccccatctctactaaaaatacaaaaattagccaggtgtggtggcgggcccctgaaatcccagctacttgggaggctgaggcaggagaatcgcttgaacacaggaggtggaagttgcagtgagctaagattgcaccactgcactccagcctgggcaacaagagtgagactctgtcccaaaaaaaaaaaaaaaaaaaaaaaaagtgacaagatcaagacatatcgtgtttctcttatccccacgaagaaaagaataaaaattgctcaaaggagagaaaacaaacaaaaacaacagaaaaaagtcacatgaatatggttataagacagctcttaatggaactgggcaatgaatttgttgctatgattgggggccataagcaaaagtgagaactgtcacatgagaagaggttttgtcacaaatcctcaaatgcttgaggttacgcatatttgaactttaacagcttaaaaaatacatatgtctgagaatgtaatttttaactgatttcaaagatctgcacatgagattttatagcctgaggtaggggaaggagaaattgtaactttgccaattgtaaatgattttggtaattttatgatgtgatttttatgctggtcatttgcatgctattgtttgcttaaaagaaaaaaataacaaaattcaacctcccaataagtgctaatggaaaaaattggtgaaagaggaggaaaaagggtgtatagaccattttggcttcttagccacctgttctcaattcccatttttcttctcaataaaaacttcagtcaggttgtattttgatgcctgtcactccacattcatcaggtgacaagactgttctaaactaatacatttagctctggatgtgtggcctgaggaaggctccagaatcttcccatttatgctgaaattggggctcagaacctcacctaatattgccctgtttctgtatgtaccagtctccttgcattatttcatctggcaaagtcaatataaaaattaataatagctttccaatctacaaataaaagtatgccactttaaatttttggcagtgagctggcattttgtcatttaatcatttcacatcattacactgcaatatggaatgtaatgacatgacactcgtaaatgacaaacacttggtctcccttgtacaggaagaaataatgtaataggaagcaaattatatccttaaaggttgccagagtttcactcccacaatttgggattaagatactgagcagatgcaaggtgaagaaaaggagaatctctcctacagatgtcctgggtaagacacaacatgataagtgaatgatccccttccagaaatggtcagaacattcctaacactgtaaacgtcctttcctaccagggactcatgcagaaagctgtgcacaagattctttctcatattaaaggcctacatgagatggggtgaaggggaaaactgtggttgacaatcagcattttttgtttgttttataattctgttattatttgctaaaagtggtcagcccctgcttaatacttgctcaaattttactctactaaagggagttttgcaaaatggcctccctagccaattcttcatatccttgccaagctcctccctcacagaactggaaaccagatctcctccttctgtaataccttaaattcaccatgttcactataaagctcacaattttctagcacaagctagtgtttactttctggacacacaccaccccagccatcccattgcataatcaaaaaaactaagagtatcctgaatcatctatttctctgaacaacctcatctccaatctttccaggaatatagaaagcataatgaagactagtccagcaaggacttcaacccatcagaaggggccccaggtgtaaataactagtctttgccaactggagactttggtcaaatcccgcaccacctcctgttggtttaccttccaaatgacactcattcttctacctctctcttttattggactctctgagtctaagcaatcctcctgtctcacctgaagaaccagtaaaacttactcttttccattatatgtcatccaacacccctccacccccatgatcatcctccatactgcaattacagagctctgaaagattcacatatgatctttactgcaaccgcttgaagcccttcaacgcacatccattgatggggcaaagaacagcttgcttcgtggtacctgcatacagcaagtcagctttagcaacttggccttctgtgcacaacctcaccccatgtttcctgtgttccagagccactgcctttactaattttttcatttctcttactcgttttatcccctctctcctataggcttttgtacctgctgacccgtttgtctgaaatactccctccacagttctcctttgacttgaattcatctttcaaggcttgtgtcatcctaagaaggaaatgggatgggtcatgtttcttgattgccactctcttaggaccttggaagcatataatctgtttgtagattcaggatcattggtgtaaaatcttcccattagattgtaccttctctgacagggaccaaatgtttttgctcattattatttttccaactttagcagacaacccagcacatagctgtcactcattcagtcagccgacgtatatgaactatttgtcaaaggaataaatcagtagaggatccagtggttttgttgttgttgttgttgttgttgttttgtattttttgagatggagtctcactctgtcgcccaggctggagggcagtggcatgatctcagctcactgcaagctccgcctcccgggttcacgccattctcctgcctcagccccctgagcagctgggactacaggtgcccgccactgcacccggctaattttttttatttttttatttttagtagagacggggtttcaccatgttagccaggatggtctcgatctcctgacctcgttatctgccctcctcggcctcccaaagtgctgggattacaggcgcgagccactgtgcccggcccgaggatccagtgttttacccacatcatttgggccccactcttgctattgtgctttctagtcttatttctctaaagagaaaatatggtttgcagaaaaattctaaagtgataatggattcctctatcatgcagggacattgaggtcatgatacttccttcgtaattttgttcaagaacgtttctggccatcttaaccccatgctttgttattaaaaacttcacaccagggaaaagtggactttaagaatgcacaggtactgttggctcttcgtgtgtgatggggagggatacgtaatcagtatttctgaacccccaaaatataaggcaattcttaaagttgccttgtgaaaatccttcactatgtacttactacatgcatcagggtgagaagccagggcactggtcattaacgggggtgattttgctccttcacccccagggaatatttggcagtgtctgaagacatttgtggttgtcataactgtgtggaggttgctgctggaatccagagcctggaggccaggcatgctgttaactatcttgcaatgctcaggatggccccatcacaaagaatgatttagcccaaaatgtaacattgctgagggtgagaaacactggtttagggcattcagaaatctcccaactcactcgaagagaccaacagagcctattttgcaggaatgtttctgaagggagtccacagtaggcattttctgctggtgtagatttggcttcttctaatcttcggtattaacagtctccaaaaaggcaggaaccatgggacagacacattagaaaaaggctgggggcggagagtgctttgtaaatattaacccagctgtggaggccacatgtatctttgagttatgacctgataaggcttttgagagcttttgccaacttcatgttcaagaaaaacacagaaaaaatttagctgatgatatccttgatgcaattttcctttaagcacagcctcataaataccaactatagagtccaactgaacttattggaaatttcccaaaaaccttggaaaatagacaagtgcaggtggtaagatatttactgaaatgaactgtctgtgaatgaaaaatatatgagcaaaatagatattttatctgtcattttattcacagaaagagatcctttaagtttctccatttcattctgctcctgtttggtgaaagcactttaaactagatcttcattttccttttaaaaaatcagtatggaaaataggggacttgacaccccctccccctccactctgctgccacgaaaacgaaaaaagaaaagtaaatttttttaaagcctcggaagaaacttctgaaaatacacaacatgacttgttactgaatctcaatcttataggtagaatggaaaaaaacagggaaactgatgcttaaatagaattttaaagtcgttttgaccctgtccaggcaagtagagttggtcactgaaaatccatattcttaataagccagaaaaagccctgcaatgaattagtattaaataataatctataaatattacggagaaacttttatctgcaatgtgctctgcctaagctaaaagagatttcttaaaatgagtatatcatggtctctgacctcaaagaacttcactctatttttgaagaaggagcatttacacatagatagtgaaattacaatattattaattaaatgttctatctcagtgcaattaaattacctttttcagcaaaagaaatgaattgcttaaaatacacatacacaactttcagagtaaaacagttaaagccttcccactcaatgtttgattttgagatcttgcacaggcaagtttggggttaggagcattgctgagtgaccaagaaaatacataaaactctactcattgagtggtagatgtcaatttccctgaggctggcatccacttttcagctgctgcatgcttctgaactgctccacattcagccattcataaatatttgctgggttcttaccgtaaggaaggcactgtcctagaagccggaagttttctagagctggcttgcaccatcttgcaagggtgaatttctgcatctctttccaagcctgcattttgtgacatcatattcgtggcttgaaattgggcatagttggagtctttacaccatggaaaccagtcatggctttttttctctcttttctagagagttggttgctaaatgtaccagcacaccactgggtacactgaaaactaaacaaagtccctgttcctatgaaacgtacattgcaaagggtcatacggataaacaaataaatatattataaactatcaggaaatgctaagtgctgtgaataaagataaaacagactaaaggactaggaagtggtgtgaggtggaggcctctattttgtggttggtgaaggcctctcagagaaggagccattcgagccaagaggtgaaacgggtgaggacctgaaatatgttctgtagatgtgtatgtttcccaggtccttcgctgacatcaaggtggaatcatgattgaagaataatccagtgaggccacctgaatcaagaagtagcacatgtattttgcaattactaaccaacttagtaaactaactttgctatcagtcacctgctgctgttgggtgaaggtctagtcaggaaaaatgatatcagccttggcgagggaaacaacttaactgaggctgatcaagacccagtctgtgagggccttataaaaacataaatacaaaggggttctccattccttcccttctccatcatcctggcagcctccaattcccttttctctcttgggtggagcatagattgcctcctttttgactttggtcatggcctatctgcaaagcctcctgaggcccacctttgacggctggtccttaaaatatatattttttccccattagagatagttctttctcttaaagtcaagttttacagatgaggaaactgaatgatgaagctgtcaagcaaattatccaagcttccagctcataagcggaagaactgggacacgaactcagatgtgcctaataacaagtcagtaaatttagtatctgcactttcacttgattgactcagtagctggatttctgaaaagcagcaggtttttcaaaaaccattttgcaaatgtttacatcaaagtgctttttaaagaaataattttaacgcaaatgtgagagaaatcctttcttgccccataaattgttttaaaacttctgattccaatggacttccaaggcctcccccagagattttgactaattttccagatactaatattttgagaccttttctgtattttgagatcctgtttcctcagctgttgcttcttccctggataagataagtttgtgggagttgagctaaaggtagtcaagaaaggcttatgagagaatgcatgatatgaactgattcatggaaatagtatgaatcccaataaaaatggctattagttcaaaatgtttcctatgtagcatgtgtagagggaaagctatatagacattagcttagtaaatacaactctgtgagaaaagtgttctaaatccatttcacagttgaggacattgatgtttagaaaagtagtgtgtcatccatcaggtcaaatatctagtatacagtagaggtgggattcaaacccagatctctgttcccaaagtgtgtgttgtttccaagctgtgcaccaacacttctcacaaaaataagattttgagctttgaatagtcacgagttgactttgaatattaacacttcattattttaccttcctcattgtttttcttcatagtttgaatgaaagctttcaagttggaatatactgagatatttgacactcgaccttattgtaactttctatttcaaactgtgtggcttctgactatccacctgcattggctagattaggctacttccaaatttggcaaaacatgccttgagtccttgtggtttgctacaacgatccacgtctatctagaacaaagcaagaggcaacgttactaagagagacattgaggctggtgggaagaacagtgctaactttagaagaagcttgataaatacacattacctgtattataataaagttcttatttctcaattttgttgataagaatcttataatcttggccagatgcggtggctcatgcctgtaatcccagcacttttggaggctgaggcaggtggatcacctgaggtcaggagtttgagaccagcctggccaatatggtgaaacctcgtctctactaaaactatataaattagccgggcatggtggtgggcacctataattccagctactcgggaggctgaagcaggagaattgcttgaacccaggaggcggaggttgcagtgaggtgaaatcatgccattgcactccagcctgggtgacagagtgagacttcttctcaaaaaaacaaaaaacaaacaaaaaaaatctttacaatgctatgaggacatcgaaaatttagaaacataacagcttcttactctaccaggctggtcactcttaccaacaagagaatgggttaatttgatacaatgtattctccttgaccctatgttggtttccaatggtcactaatttttttgtatagttggtcaacatcattgcctatgttttctgtaatataattggggatgtgatatggtttggctgtccccacccaaatctcatcttgaagactagctcccataatttccacatgttgtgagagggacccggtgggaggtaattgaattatgggagtgggtctttcccatgctgttcttgtgatagtgaataagtctcatgagagctgatggtttatataaaggtgagttcccttacacacgctctcttgcctgtcaccatgtaagatgttcctttgctcctccttcatcttctgccatgattgtaagacctccctagccatgtggaactgtgagtccattaaaccttttctttataaattacccagtctcggatatgtctttattagcagcgtgagaacagactaattcaggatgaaagttacagtcactactatgtagtctctaaaatggcactgtccaatatggtagccgctagccacatgtggccatttaaatttaatgaaaattaaataaaatttaaaaattagtacctagtcatactggccacatttcaagtactcattatccacatgtggccagtggctatcagattggaccacacagacacagtaacatctccacctttacaaaaagttctattgaacagcactattctacagtgcaactttattttcagtttttaaaaaacaataatgtttaaccaaccctaagcttctgacatctttagctttccctaaaatttctcaaatacatatagtgagggatggagggagggactactgcacagaagttaagattgtgggctttgatgtcagacccgagtttaagcactggctgtgctctctgttttctgtttgaccttagttatatctcttaacccatctaagttccactgtgtgaagctttaagagagagataatagtagtacttgccacacggggctgttgtgaagattaaatgagatattgcacacaaagagttcagtcagggtcgagtgctcaataacatattgctatttttgctactgtcaatcactttaaattaccagtgtggcaaaaacgagaatgcccagccaatagtctgtagcctcctctcctttcccagtttgtttgcagtaaggctggtgatgtgactagggctctttgagggatgtaacatatgtcacttctggactgaggaatgcagagccccatgtaatcgtccacgttttctctgacagccaaggataagggccaggggctcagctgctagtcacagggatggagcaacttggatcacccagtcatagcatggggttgctctgcagagctgtctgaccttcggaggactttgtgtgaccataaactttataaacaaagtcactgagacttggagatggcccattatctatattggaaggattgaattcattggaggcaattaggttgtctctgatcgtaagttcatctacctagacctcctcagctaaacctattgaggctggataatatttggttatattaattgatgtgcgttgtattcttggacttgccttttcatcttcattcaaactaaaccaggagtccattgttccttagagaagagtcaaaatagcaaaaatgtggagaatacgcatttttgtgtttcaaaattctggacacgtatttgaaaacctcaacaagagagcataaagtttatgtcataactgatttattgggaataacacatgaagagttagattttctcattgcccagcttgttttagattctccagacttgtgatgtggaccagaagggagcagcaaaagtattgcttaggatccccccaaaagaggtctgagctccagttctgctacctggaatctgaatgacaatcaacaagttatgtaagctccctgggtttcaggttccttagctgtaaaactgagaatgaaaacatgtcaggaaattcttaaggtgctagatgatgatagtgtagaccagctctgatagatataacttttgttaatggtagaaatattctgtatcttcacagccactcaccatatgtggccatcgggcacttgaaatgtggctagtgcaactaaggaattgaatttttaattttagtgaattttgacgtatttaaatggccacgtgtaactagtggctaacatcttggactgcacaggtctagactacattccttcccatccccatgagtttgctctaccaatgccccagaacttagacacataactgtgaattgactgaagaagcatgaattgacgagaattgtttcttccagccaacagcataaaaacttgctataaaaattaatttctattggaaaataacatttctttcacacttggtttgggaatcctctctagtgccttaaaatagagacctattttattctcagaatgatcaagagcccgaatgaattaaactgctggctttattcctctgcatccggcttctattggtaactttcacactagccaggaaatctgtttgtaaggctgagcgactggttgttaaagaggggtcacgcctcacggtaacatgtggccccactagcccctaagcactggcatgtagccacttgctcacacctaccaccagacgcccaaagaagctccagctctttgatttaattgttatcctcctctttctgcattttaatttttcttacattgactcactcccttagacagatctgaggcaaagagtatttgtccaccatgagtcactcttacaggaaagggagaaggataaagtagcaaagagagagaaggagatgcacatgtgtttatgtttctgagttctccatggtttgattaaaatggttcatggaacagaaagaaaacgttgctttactagctgtcatcgctaagtgcatctttccatctctctgtctctccgtctctctgtaacagggcacattaaagcaggagggctaaagcctcctccctcccaggcctggaattccctatgacctgggacttggcaagcccttccctctttaatcagtcacagtgttcctgaggcccctcctcttccaggaagacctccccaggcaaagaggaaaagcaacagcagccaattgccctttgcaatccaccagccaccctggccctccctcccatcccgttagtgtttgtggtagataatagcaattaattctcttatctaccaaataaattagatcttcgtatttgtctccatcttgaaaactcctagagagaagtatattcgtaaactctgtctgtgtagcactccattagataagtggattgcatcctcatttttcttatcccaacactgctgatggattatgtacatttgcgatgacacactctgattttgatgctcattcccccaacacccacagaaaaagataatttgcagctgagtaaagaaggtaatttttaacacggtatttataaaagtgcattataacaagtaagggtatagctcgggtaaggaagactctgggttctagatcatttccctgggataactctaactccttgcctttttctaccactgaagaaagtatatcagtttaattgtattatatgtaaatttgcctcaataaagctgaagaaaagaaaaagacagagctaaagataaaggaagagtgacagtaccatagacataacctttaaactcctcacatctcgaaaacttgaaaaccatatacacatttatttagttctttagttgcattaacacatgatttgcaacaaatctcataactgattgtgatgtggtagaatgtctcagaaaaacaaagaaccataaataaagaaagaaaataaagaactgctttccatgtggtaaggtcttgaggcctgaggtggatttttattacttttccatccccccggcctggtagggtccctagtacaacataactacttaataaatgtttattgaactgatatgaattcaactgaagtgttcaacgctattcacagactattatgtgaaacatggtgtagttcatagttgcaagaatgatgagtactgctctcatcctgaaaataaggaaacagaggtgtagagagagatgaaggcatttgccttgtgttttaaaatttgaatttagtggacttgggatcagtttcagcactgaaaccccctaatccacatattcccactatgccatgctagctcaatgagggctttgcacagagtactcatacaagcatttctgaggctttctggtccctgatgccattcaggtctttggatgtttaaaggaaggaaagattgcaagaagggtaatgataccctgcacatctccatttggaagaggctctttattgacacctgttttcatcaaaatggattatgtatttacccaagggctgctgtcttctttatagactgttagcctccaaaaataagtatattgacctcataaagtgcttaattttacctgagttacttgcccttttatttccaagacttcttttatattttaaataaccactttgatgtgctcagtgccctgaatgaaagtagttaatcaggcaaacgaagaaagtaaaatgagttaaggaccagaagtgacgatatctgtgaaactggctaatttcaccactattggtggtaattaaatgggtgatatattatggcagtgcaacttgtgtacagtatgccttttaatccccttccccttcgagtgtaaagagctttactgagggagttgattacaaaatcaatacatgcatattatttttaaaaatatacagaagtgaatgaagtagaaagataacatcttcacccgtaaattcccttccttagcctctctggaaaaaataactttgagcaactcatacatatccttctcagcctttttattaatgtgtactataaggatatggaaataacattttaacaagcctactcttttcatttaaaatttctcttgagcatcttagatatacctcctatataatatatacatatgcatttatatgtacacaagtgtgtatatatatgcatatgtgcttatatgtgtgcacatatgcatatgtgtatataaacacatacacagacacctactcacaccgacacatatactgcatatacatacaagtatacacacattcccaattgatgagcatatagatttttttaaattttctatgttataacctttgctgcaaaattcatcctgtacttatatcactttacaattgtttaattatcccctcaggaaaagttccagggagtagaattataaagttttattttagtaattttaatattttaaaaattaaatatctacctttatgtggcagagtagcatgataaaccatgaacccttgcttaaagcatttaaatcttaataaactttgtgaaaaaaatcagtttccaaatcagagataacgtacagaaaatgcctagcatagtgcctaggatagaggaagccctcaaaaaatgttagttttaaatacaaacaaaccatgtcagaatgtgatgggaccccttcttctctttactgcagattgacttttggggaggatttacccagacagtctggctcaacagaagccatgggataaactggatcccatcgatcacagccccacccctgtccaggagctgccgctgcctctgtgtacccatccccacccccaaacagacacatccatcacgcgccatgcagagtttatcttcagtgccaggatggcagcagcaacgggcagaatctctggatgagaagccctgggttgtacatttgtgtatgtggggaaggactagaagcttggaatacatttgtcttgattttcccagcaatcatcaggcaaatactccaaatgcagcatttatgaagtaagggcatctcccatgtgccatccaaggctgttctcaagtgctttataccccattatttcggaggcaaggagtagagtcaactcttaccccaggcaaaataggaagaagtttatctctatgaacccttcatctcctgctttgttttccatctttgcttccaacgataccacagcacctgcagtccagacaccagatctttgtcctttactgacccaaatataacagtcctgtgttctgtttgaatggagttctggtgactatcaggttaatctgataaagtaactcaggattgggtcccaagagcagatagcatttgatgagtttccccttcccaggtaaaaggtacttgctctcaatttcttaaaagaggaaataccaggctctgtagcggggctggctgaggagcaatatttagaaaaagagtacattttttgatatcctaaaatcatacactctatatgatgtcacaatctgtctctgtgcccagtggccctggaaagagagtgctctacattctctgggggatttaaatgtaaactaaaaggcccctgaattgaagcctcttgctaatactccagtttcctgttataattttagacataatttatcccaaaccttacctggagtcaagatatgaaattaatcttagtgacaaactcaggatagactctcagacaagaataagggtcttgatgattgcaataatctttgaccattcttgtgtctgtccccatttcccagttggagacctctctaacaatattatgtagtggaataagtaaaagaatggaagtcagaaaactagaaggaggtgctacctctatcccattttcattggtggctttaagcaagtcattcacatttatttgagccccagtttcctctttcttactcttgtttggtcaatggtatctgggagttggttcaaatgagagaatcaatctgaaagtagcttggttaatataaattgattaagaagtgttagcttattcacaatagtaaagacatggaatcaacttaaatgcatccatcaatggcagattggaaaaagaaaatgtggtacgtatacaccatgaaatactatacagccataaaaaagaatgagatagtgtcttttgcaggaacatggatggagctagagaccattatcctcagaaaactaacacgggaatagaaaaccaaataccacatgttctcacttctaagtgggagctaaattatgagaactcatgaacacaaagaaggaaataacagacactggagtctacttgaggttggagggtgacagaaggaagaggagcagaaaagataactgttgggtattgggcttaatatctggtgacgaaataatctgtacaccaaacccccatgatgcaattttatctaagtaatgaaccctcacatgtaccccgaacctaaaataaaagtttgtaaaaaagaagtcttagttttatcattttcattattgctattattattacatctttggtgaaacaaacacaaaaacaaaacagcaatccatgccagcaagattctttgacctatttcaagaaaacattggcaaatcaacatctagcacataatactgtgaggaaccagtgagctgcacaacgtaagaacaagtgaggatgacgtgaaggaatctggatgttagggcaggccagttctttcctgagtctttaaagaaacactcattgaaatccttaatatgtgccaggtgctataatgaattatttgcatgcattacaccattaagccctcacatcagccttattaagtagataaacacattatccccatcttacagatgaggacagagaggtccagagatgtgaaataactggccccagtttcctcagcaactaaaactgttgcagaaattctacggagatgatgtgtggctcctgcacagcactgggcttgctgcgatgttagtaccatcacttttgcatgagatcatgcagaagtgatggtggtggaagcctctgtgctagtcactggtactgaggccacacgggcttttgatcctttcaggacgtttccaggataagagatccgtgtctcacctctgcagcaacagttgggaagaatgccttcttctgagtgaatgcatgagcctgtcttacctgtttctgctttcattcccaactatgtcctcaagagagttcacacaagcccctcccatcagtcttgtagaattgcaactttaagcagacctgacactatagaaacaataattggcaagacattcacaaggagcaaaaatggtcatttcctcaggcaccaaaaaagtataacctagttctgaggttccagaaaatgatggctggaatgaccctgaagtctgcaccaccataacaaaaatgcagcctcattgctctccttctgatagctataatcctccacatgaaagcaggcataactattattttagatgacatcccctttttaactttaagcagtgttctttaaacatttctaaactttcccaatttctccccaacaccatgctatgaatttgcttgtcactgtaagctgtacacaaagagagacacatacagcaagcacaaagatatcaggaagtggttttcctagcaacagtaatcatctgaaagatcccagaacaccctttctattcatacagcagttcgtgttttgaatagtgctgacaggtgaagtggattcatggtatttaatacaaaaaatattgctggggattggtactgcacaaaagctcaaatatccatactattcacaagcagctgaattcactgtttttatatctatcgagattatttagtgaggcacaattgcaaaagcaaatattcacctgctcaccgaatgactaatccggggtgtattatggaaagtctgattccctagacctcattcaggcaactgggacacagttctaaatcaagtccagctcgctccatgcaagacagtcttgtgggtagttctgaatgataaagagacatccccctctccagttccctcagcagatgtgtccagtttaaaataaaaatgagtcaacgctgttgacaaaaatcacccacccccaaggaactccatctagttattgctttgactctatcagaaacactcccaaatcactcctcccatcctctcaccagccacgtacaaagcaaagttatccctgaaggtgaaacaaaagagaacaaaaagtaaaacagcaaaaaactagagttctctcagagagacagagattgagagagagagagaaagagagagagggagaaaaagggaggcagggagtgggaaaagaaaagaaagagaaagaatgtcccaagatgcaaaggagactgcaggagaatgcttggagcataattccgtaaagagagagtgtgtgtttaagtcacacagccttacaatccatgtgaaactccataaggtttttattattaccattattctcttttttaattaaaaaacacataatatgtacaaacctaccacacatacaaacctgtgccttgcactgggggtaagagaggtctcattcttaggtttacaagttagctaatgagatggaataataagggaaagttgtaagcagcaattgatgtctgcaaatactaagtttcactctttagcaatatatggctgcctacatgttgatacggagagggggagtggctgtaatacagggtagttaagtggaagcatttgaaggtttgaattctagctgtgtggttgagagcaaatttgtggaatatggcagtcatacttaccttacaagactgttggacagattgaacacgacaatgccctcaacacatctaaagcacttaagggtagctacaattcacagagggtgccaatcaaagacatgccacttaaaatgacaatggtctactatttcacacccctaaaattaacaaaatttagaagtcttataatatcaaatattgtcagaggacgtggaaatctgcattgctaccaggaatgtaaaaggtacaagcatgttagagatgtatctgatgccacttaagatgtgtgtactcattgctggagccagaagttccactctagggtgtattcattagtaagattctcataagtataaccaaggagacctctgtgaaaatgaatgtgctctgcttttaatactgagagatcagaaaaacctaaatgcttatccataggaaaatagataagcaaatagtggtatattcatacagcagttagaatgagtgaacaaggcttgaatttatcaatacagctaaatctccaagacataaagttgagcacccaaagcacgttgggcagatggatatgaatgatgtgatgccgtgcataaaatgtttaaaatggacaaaacaaacccctacttcgtagtgtacatataaaacattttgtggtaatttttaaaaatagattattagcagacttagctaaaagaatggggaacatagacagagcctgacccatagtccataaacttgctagtactgacagtatacaaaacactttgggatggttcatgaaaattcttgttttaatgactattagaaaatatttttaatgtataacgtaaagaggttgttttaacaataaaatcgtaagtcataaattaaataattaatactcagatgtggtaacaaaagagtggttttcaattgggaaacccttcattcaaagcaactgctttgattccatatgtattccaaagaacttcccacttcctcccactccaccttccaacaaggtacatgtcaaataaatacataaacatatagaagaaacaaaagtcacagtcatccattgtccatccctctggcaaaatcaacaaagacaagaggtacaagcggttagaggctcccatgatgtttcttattccaggcactcaggctgagagcctcttagggctgctgaatctgtgctctttgttgttagatgggataaatgtatgtggatgtgctgccttttggattcttttaaaaactgttcacattccaaaggccatgtgtgtcccttgtttctccgtgactgatcaaaagagagctacatttcaagatttatgaaatgcatgtcattattcatgctgatggagtttgtcttagagccaaaccacgaatgggcaattgcatgaacactgacccataggcctaccaagaaggggctggaagagaatgaaaggcaaaaagaataggtcaaagaggagccaggggtcccacgtgatatcagagtcacagcagagatagcacctctgtgaaaaaggagaaaataacactcagctcaattttttaaaattccattaagcacaaaactgtgtcctgctccctgtattaacaaacactaatatagagagataaatacagagagttacagagaaataaaacatatccctttccctagaaagtcttccaataaaaaacatatgagtgagaagacaaataattaaattgataatttcagaaagtactatttcagaaggaagtatttcacaaaatgtgttcacaggagggacagccaacccagaagggtgatagacgatgaacatggaagactatcttaaggagataaaacctgacctgagtttcaaagttttaaagcacgtgggtaaaaatccacttggccaagcagacaatggagtccctttgttccttccattttgtccttccacagctatttactgattatttattgtgtcctaagtattgggaatataatagtaaccaaaattagacatggctctgcccttcggagcttatgatacagtggggaattcaaacataaatgtgaactctgtaatctagagtacaaggaactcagcaagggacagggaatctgtgagcttggataaaaaacaatgatgtttttatttttattttttaaatttatttatttattttgagaaggagtctcgctctgtcgcccaggctcgagtgcagtggcgcgatctcggctcactgcaagttccgcctcctgggttcacaccattctcctgcctcgacctcccgagtagctgggactacaggcacctgccaccatgcctggctaattttttcatatttttagtaggaacagggtttcatcatgttagccaggatggtctcaatctcctgacctcatgatccgcccgcctcagcctcccaaagtgctgggattacaggtgtgagccaccgcgtccggcctatttttagaaatctttaagtaatatttagcatttcctcccattgtgaatttaggcaacaaatccagtagaagtagaaatatctgtgactttgctcaccaatataaattctagattcttatatcccaatacaattgctgaaaatgccttaaaatatcattcgtgctcatcgccacttcaaaattacaatagttattagattttccactagatcttgttatttaatatggtaataaagaagcacagttattactgtgctactctttaaaaaatattttgataaccaattatattgaaatctaagtttctttgtaatcctatgtattttatattacgcatttgataacattattctggccttcctggactgccatagggagccatggaacaaaattattaagaaaccctgcactaattaagtaactgaaactgataaaaattacaattttgacaattgccatacaagggaagtatgcaatgcaatgggcaatagtgagggaagcaagggaatgtggcttgggttatgggagaggtgtaagttttaactaacaaagggagcatgaaagaacattccagaagagggacccgacatgtgcaaatatgccttgagggggcaaggctgtaggaagccagggatgctgagacagagctgaaagttaagggatgccgggagagggctgatgcaggtcagtgaaatgaggctggagtggtgggcagaggtctggcagtgtagagacagagagcaggtgcataaggcatagaaaaggaaaataaggcagtgcattcagagacggcacatggtcaagtttggttaaaggccaaatgctgtgccagagagagaaaaggtgaggttgcacaggttgcaggactcagagaacagcaaatattgagggctgtggtaacaagtcagactttatcttgagggtactaggagtcattgaacaattgattggcctgcccttaagaacctcacacttggtgagctggtgtatcaatcagacatatatatacacacacacacacacacacacacacacacacaccctacagacactgaatcagtgacattgttcctaggggaattacataattaggttcctataagcctctggtcacatttttgccaactgatgaatatatgatcttgtacgatgtgtgtttatgttcaaagacaccttcttcagtatatattcttgattcattaacattgaacttacaaccaacagcactattactcatgccggaacaagcttacctggcatacctatttcccctgcaaggcacatcacagccttcttgtgcttacaatacctaagcactagacagcactttttagcactacccttaggggccattttaaacagcaaaatcatgaacaaaaagcacaaaaatgtgaaaaacatggcactgaacagaccacaaaaaggactcctgttaacagtgtgagaactgaaacaagaaggcagagcagtgttctgttttgtttttttttttcagtctcagcctggaacatgtgaatcaagtgactcaaatcttttgcctctctgtgctcgtttgcaaatgactgtgaaagctctctgagtattgatttcagggtgacaaataacttttagtaagtagaattagaaatatggaatccgtgaataatgaggatcgactatacagcattgcaaaggctggcaagtccaaaatccataaggcagcaggctgaacactcccaggcaggagctcacgctacagtgatgggcagaatttctctttccttggggaaacctcagttttgttctcaggaactttccactgcttggaggaggcccatccacattatcaaagataaactcttctacttacagtcaactgactgtagatgttgaacacattacaaaatacctccacagcaacactagcgtttgatcaaataactggtactgtagcctagccaagttgacacataaaactaaccatcaattatggcattgaaaggaaggagaaatgcaggcagtaaaccatataaactgttcaggtggaaaatgctgctagttggaccctgcttttaagaaattttagaatctttttgctttcctcttagcattttaaagtgctctacacctccagatcgtggtccttgctctccacagccatttgtccctccatccagtcctgtccctccaaggcaggagaaaacactacattttgagaaaatgtcctactacacttgtagcatatttccccttggcatctcaagtacttagttcaatatcattccattttccttaagatgtgaaacacatttgagaaggcagacatactgcaacatcattggggaatattttagttgcaagtaacagaatatttgacctagagtagcttaaaagacagttgtttatgtttttgttttaaatcatcatccttaacaaaaactctgcagatatgtgttgttgggttggtttagagaagggttcagcaaaccatggccagtggatcaaatctacactgcagcctgtgtctctctttttttttctacagcccccaaattaagaaagattgctaaagcaacagcagcaatagagaccatgggcggcccacaaagcctaaaatgtttaatacgtggctgctcacaacacaagctttttggcctctagtttggagattcaaccctgtcttccaggactcagcctccatcttgctgctgtcctggggctactggcgtcatcttccctcatagatagctgccccagctccaagaatcccatctacatgcccctgtcttaaaaggaagtggaacttccacactcatctcccaggagggatggtctttcccagaaggtcccagctggtactcccacggcttccattggttgaagtgcagtcacatgggctagctgcagaggaggctgggaaggggcacaaagtgtgtcttcccactcctccctgtgggaggagcctcctcccatcatgaggctgggattggctgccggggaaacatcctccagaattcattcaccaggaatgcttcacctctttaggactatttataacagtatcaaccttgtaatccataaggacagagatcccctgtggttggaggctggttggtgctatagtactaccctctcttcttttgggggtgcagaagaaagaaactttatgaaatgactaatttgtcttcaaatctaagctcttaagagtgttttatatcttaatctgcatagtggttacccaggcataaacatatgtaaaaattcattatggtatacacctaaagttctgttcagtttactatacgttggttatatcttaataaaagagggacagataaaattgccaaaggaagaggcctttaaaccctcctttagatatctaaatacacagagagatgtacacacacacacacacacacacacacacatattcacacagacagacacagatatcttatatccacatatgtacatatcttacatcccacatcctatatatatgtgtgtgcgcacacacacacacacacacacagagcaatgatagcatatgttgagttctattaggccacctgatacattggggggtggctgtaaagcaagcacattggggactttctcaggcaatcatgtcttacaagaagctcttgctttcagcttgtacccacctcttgccagcatgcttcctaaatctcctggatttgtttagtcctagataagacacagttactcccaccacagaagatatgagaccagagaaaaggaaacacccatttctttgtgacatcttcctttaataatcagtagagctaaataatttaaaatccctgtaatggtgactttttttccttgcttttcttcttggaacacaaggggctaattaaaagtgggaaagttcttgtttgatcagaaattcttgtgttttggcaaaagagaaactctaatattcagaaagagctttaattggctttagagccactaaatttcctttccttatttaggacattacgaatgagctgttctctctggaccacaaagaaaaggtatggtaattggaccagaggaaccagggctcccagccagaggaaccaggttttcagctgaaagatggtctttcgatttgaatctatgggattatcttttaacctaactccgtgtgattcctctctgagaacctctcgtaagttctggtcttttggctgacttctctccataaatgactctattactagagcagtaagcttgtttattgaggaagctgtgtgtggtggtccctaatggagcatgtcagcataaaagccccattatactgaagcaggcgtaggtccatccatttcatgaagcactctttcctggatttattagtattagtacaggaaaagtgagtgctctatgtagcacagacttttgaaaccaatgtgctctcaccactagaaaaggcaggaaaaagaattccccgggctcataggtgctcctaccaagaagaaccatggacttcgtcaaaagatgaacaatgttggaagtcagtacaaaatagcaaaaggacatctttatggaaaatttgcaaatgttctttccatggcagtgaccctaaaagctgatatgtctattggttagcagactgcttttagttctcatttgttgataaatgctatgatgaagacgattaagtcagaagaaagttacaaccaagtcaatttagtattagaaacactttttgttttataaagtgcctatctattgactcttgccagttcttttttaataattaaaacaggggcccatttatccactaactgggacatgcttgcatgaaggtgtttattgatcttgcatgaaggtgtttattgatctgtcattgcaaagagcatactcttgctgtcttccctgcacatctttcaaacagtggctggtattgtcacctagcagtgagactggtgggaaatgacagcgatggcaactttgggggatagcttctcccagtaaggaaggcaaattctacaaaaagaatgaagcacagcagaaaaagtgaagcgctggttcttacaaggtatttgcactgaccctatttatgtctttggaatgtctgtttgatcacctgctgaatctttggaactatctatgaataatagattaggcacttgggctgtcttaggtttgtgatgtcttgtcctctcttaaaaagaactttggtgcaggttacttattaccgatcaacacactacacacttccctatcttacctaaaaagtatcaatatttttgctgtgttgttggccaatgcaaagattataaagcgtcaccttaataactaagatttctgggttaagtgtgagaagtactaggctatgactgctggtggacagttagctaaataattcaagaagatcttatggctccataaaatgaataactgcaactcctttgtctatatccccttctgctgatcatgaggagtatataaataaggactctatttggtttcatgtgataaatatctgctggatgtggcttaagtaaaacaagagggatttattttaaagatattcagtgttttagggcatgcaaagagaagtaaagcaaatgagtcttagaagaaatctgaaaccagggactaaagtgccaatgagatttttgttccagctctaatttctacctctcttggggcatctgcagcaaaatgacctacgcaaattgggctttacacaactacaagtttctttttggccaatatcattgactcccaacagtttagagaaaggggtcaattatttgtctgcttcgacaattcacaaccaggtttcaaaaaaaacaagtctcaggccaaattttgatacttattaacaagctggcacaaaacaggaatagtccctttttcaagtttgacaaagacctacctctctccttttagttacctcaacaacattttgcatgaggagtcttctggaagcccagggaatgatagtctagcacaggaggtggcacactttttcggtaaagagtcagatagtaaatatcttaggttttgcagaccatatggtctctgttacaactactcaactctgtcttaacaccaacacagccattgtcaatattcatctctttcgataaattatttggacagaaattggaatttcatagaatattcacatgtcaaaaatatacgtcttttgattttttaaactatatcaatattaaaaaattcttagttcgtgaactgtgcaaaaaagaaggtggtgggctagaattggcccaggggccatagtttgctgacctctcctttagcagcgtatttctaatgacagtgaggtgaccaagaatccaccaaagcagcatgtagtcacaaaacctctcacaagtcacgcctggaacaattttgtgatgagatgattctgctattatttttgcacatggctctaaaaaggagtgttgcattataccttctgcacaccaccatgaaggtacgagaacattctttgataataataatggcttcctaatatgcctggaagctccctcaacttccagccattgtccaaatctcttttgattgtcagccagtatccatttttttcccacaggttatataatctcctccaaaaatgtgtctatgctattttgaggcttaagcaataagcgttgctccagccatctcagtgtttgatctcgtatccattggtgtggtacccaccgtctaatgtcttacctcctctattgtacacaggttctgagaggctgccttggcagagattcttgtgtttgctgagggttagcttttaccaggacttctaattgataatttaaaatgaggatgagactccatctaggcccacttttgaggtttagatactcagatcaaaaattctcaatgaacacagagcagtcctttagcgaaaaatgcccttccccagatgtttctacctgccttaggtattccatctccctgaagacagtcatatcaaaaggattcacaattctttgatgaaacacacagaaattgtttacttttgtgagaaaaatgaacaataataaaaacaaatcaattctcagagaaaattgaaaaggacagtaacttcatacattccaaatagcacagctagaaatagaatttgtgccaattttattaatcataatttttaactggtcaaatattggtgatttcacctggttcaaaggaatttgaagtaaattatatgtaacttaacagtctctgattttttgtttccttactgcaagttgccttgttcagtttcccaagttttaaatcatacagtagggttgctgatgatccccaagtttttacattgtaaagagagagagagagagacagagagaaacagtgagaataagagatggagacagacagtgacagggaaaagcataaacagtgaaactgactatctccttggcctaatcctagttcctggaggagagactctgactagttcttaccccttgacaaatcagtgtggttggagtagggatggagccaaagtcatcgcataaagaaatttccaagtgtccactcttgtggatcagagcaaggttgtaaccaggacagctgctattgaaagcacaacagagatagtataataagtatccttcacagatgcatcttagagctgctatgttatggctgtattatggttccatatgagtcctgagataaaggagtaatattcaaaatatttaacatcaggcatcagtcagtcagaaccaatccaggttataaacaggtggctgagccataccagtgaataccctagtaggatagtatgggctccttggtgtatatgtgccacattttcttaatccagtctatcattgttggacatttgggttggttccaagtctttgctattgtgaatagtgtcgcaataaacatacatgtgcatgtgtctttatagcagcatgatttataatcctttgggtatatacccagtaacaggatggctgggtcaaatggtatttcgagttctagatccctgaggaatcaccacattgacttccacaatactatgcagccataaaaaatgatgagttcatgtcctttgtagggacatgggtgaagctggaaaccatcattctcagcaaactattgcaaggacaaaaaaccaaacaccacatgttctcacttataggtgggaattgaacaatgagaacatatggacacaggaaggggaacatcacacaccggggcctgttatggggtggggggaggggggagggatagcgttaggagatatacctaatgttaaatgacgagttaatgggtgcagcacaccaacatggcacatgtatacatatgtaactaacctgcatgttgtgcacatgtaccctaaaacttaaagtataataaattaaaaaaaaaggggaaggtatttgcaaaaaaaagatagtatgggctcctttaataaatatcaataccattaccccttctaaaatgagttctttcatggacctgggcaatgagagaggattagaatacagaggtctctgtaataatgggtaaaaaggcagataggtagccagaactttgcaatttgttgctctgttcttttggtatgtgttgcctggtgacttgtcaaccttctgtgttcatcaggggtttttgccaatctctggagaacaaaaagcataaacaatcacatagtgagaatattgtcttctgcatttgctttaagaagaggtttccaacaataccttagagctaaaagcaagggtcctctgggcagaaatttcagcgtcactgcatgaatgacactacctggtctattctcttctcaacctgaggaagatggggaagtctgtctgcaatgactgccacatccatttaccgtagcagtaaccaccctggaaatggtatcactgcttgagcctccttgccctgcttagagaacaaggacaacttgccacaagaggtctagcacataagacaagctaaaggcattttcctggatgaatcctggaatcttttctcttctttgccacctcaaaatttcttgagcttttaggtcttttcgaggtactagttaactcaatgatttttgactggtgggaaagtagaacaaaagttcttctatgggaagggacagtgttcaactttgcctctcacgtggaagaagggtggaataggaggtcagcttcctggggcagaaaaaaggttgggaactagtgaactagctgattaacagacaaatgtgtgctatcatgttaaagcacattgaggtactctactttcatggcttcctgctaggtctgcaataaatatttattaaatcaaactgcatacaagaacctgacttgaagaagagcagacaggggcgagggaggcactggggatgggagcaacatacaggggctgctttcaaatatttgaagggcatcagactgcaaagaagttagaccttccaaacaaactaaagtactcgatggcttcccgttgtctaaagaatacaatcccaaactaccttatcagaactataaaattctacatatgggattcttgaaattggctgaatattagaatcaccccaagagtgattatgtccgtggctggaaccctcacgtgccagtccctgggatgggacctgggcatctgaattttgttgcatagggcagattgggagcctctgctgccagattatctcactccagcttacttctccaggctcatttcctaccacttccctctttgtccaaaggtcttcctcctttgcctcctttctgtccctgtaacattccaggcacatcccaactccagggctttggctcttctgggttgctgtgcttggaatagtcttctttctgattaaagctggcgcgtcagctcaaagagtcatctctaggtcaggagatgcctgaccctctggattagttttctaggcctgctgtaacaaagtatcacacactggatggcttaggacaacagacatttcttgtctccctgttctggggtctagaagtccacaatcaaggtgctggcagggccatgctccctctgaagactctagaggagttcctgcttcatgtctttcctttagcttctagtgttgccggcaatcctgggccttccttggcttggagatactcactccaatctctgcttctatcaccacatggcattttctctgtgtctcttcatattatcttccctctgtgcatagtctcttctctctctctctcattctttgagacaggatctcactttgtcacccaggctggagtgcagtggtatgatcttggctcactgcaacctccaccttccaagctcaagctcaggtgatcctctcacctcagcctcctgagtagctgggaccacaggcatctgccaacacacctggctatttttttcctttttgagccacagtctcactttgtcgcccaggctggagtgcagtgacacaatctcggctcactgcaacctccgcctcccaggttcaagtgattctcttgcctcagcctcctgagtagctgggattacaggcgcctgccaccatgctcagcaattttcttttttgtattttcagtaaagacggagttttgccatgttggccaagctgctctcaaactcctgacctcaggtgatctgcctgcctcggcctcccattatcttttgtagagacagagtttcaccttgctggccaagctggtctcaaacctgatctcaagcaactggcccgcctaggcctcagaagtgttggaattacaggcgtgagccatcacacgcagcccgtctcttcttgtaaagacactggtcatgtttgattaggatctatcctaataacatcattttatcttcattacatctacaaagtccttatatacaaataaggccacattcacaggtactggggtttaggcttcaacatatatttttgttggggtggggcacaatttaacccataacaccctatgtctaaagtacccccaccccactctctctggtcatgatcatttcaccttatccgaagcaatcttgcttatttatgagtttagttgtgtattggctgtcttcctcactgaaggtaaactccatgagagcaagaactttgcttacctggaatgtcactatgttgataatgcccaaaatgatgcataataaacacttgtttgaatgaatgaaataaactacaatcaaacagtgaaaactatagggcaacagattttagtttaccaggaggacacgttttatataactagagcccactcaacatgaaataagttgctttttttttgaggcaataagtcccctattgtggcagacatttataccaaagctgggcaacgctttagaagagatactaaagaatggatttgcatatcagttcacaaatggattaatgacctccaagggtcctttacacccagaagttctataattctatatctgagagaagccttttaagaaatactgtgtcttaaaagaatgactctaatggtgaaaacgtcaggcaggcgtaagtttcctgttacaggtttctgacaggtgaaatcgtgtgacagccctcaaatcacattacatttgtaacctcctttatgtctcatgagtctatttttaagcttagcttgaatttcttcatattttatttatttattattatgtttttgttggcccattctatccaaagggggaaaaaaggaaaaataaataaatttcagtttgggatccctttaatgtcttaactaagcctgttacaatgagatattgtattaagttggtcctgtcttaagaaagaaacaacttctctgttgaaagcgcttgctgccaggggactcattgttaccacagcagtcaactttgatttgtgtatcaataatgtcgtgtcagtagccagagggtatggcaacagggtgttccagatgcttttattggtgcttttgctggaggattatttcaaattaactttagtctcttggaagacactgaacagtagtatgctatttcccatttgtaaacaaaatggtgaataattatgggagaaaccaagacaggatgatttctaggaaatgtcacgtctgcagatcttaatttcctccaagcactgttgccctgttcttcctttcctgttgctaatatcctcccaggaacaatactgaatagaacctgcttacagggcaattggtggcttcacagccactcaacaaaataactggagactcttctgctgtcactgtaaccacaagaagagattggaagcctggagaaactgctgaaggctaaatagaaagggacttttaaatgatattataaaatttttaaaaatgttttatatgtgatggtaaaagtcatagttattgtataagttccagaaaatactacaaagcaaaaggataaaaatgaaaattacctgttattctatcacccaagataaaccactgcttatcattttggtatatctactttgaattctctctctctctctctctttgtgtgtgtattttgcagaaatgagatattatattattacttaatgatatagaacagagattggcaagccttttctgtaaagtactagatagagcagattttcagctttgctggccataaggtctctgttgtaaccactcaactctgcagctgtaggacaaaaccagccaaagacaataagaaatgaatgggtgtagctgtgttccaacaaaaccatttacaaaactaagtgatgggcagggtttgtcccatagccatagtttgctgtctcctgagataggatgttatattttgcatgtcattaatattttccaacaccatttttaaagataccatgcatggtatgacattgcattgatgtaccataatttcttaactacttcattgttgttgaactttaaagctatttcagttttcattattataaaagacacaataatgaatatccttgtggctatattttacaacatattgatgattttttagtacaagttagttaaaatatcattgacaattctaaggtatgtacaaagccctcatcaatttcaatttttattagtggtatgtagttgtagcatcctcctcatatttgggcaattctttgttggtggtttcccagtgctgatgatgtatgacactttgagtgtttttagggacccttatgttagtctgagtaatgattgtcatagcaggacagctataactggcacagtgtttcatatttcttttggggtcatgagtactttgagaatctgaggaaaacaaagactattctctgaaagaaaatgcacataccaaagaattctaagtataattttagggagttcaaagagctctaagacagttttcttaagtaaatacttaaaagtggaattgctagatcacatactaagtatatatttaactttataagaaattgtcaaaaagttcttcaaagttgtaccattttaagctcccagcattaaagtttgaagttcaagttattctacattcccatcagcccttgatgctgtaagtcactttaattgtagccattctagtgttgacgcagtagtatataattctgttttttatttgcatgtaagtatatgatccattgcaagctaattttgtctatggtgtgaggtaggggtcaaaatttatcatatattccatgtgactatcaagttgtttcagcacaaatttttaaaaagactattgtttcccccactgaattatcttggcacttttgtcaaaaatgaattgaccatatatgagtgggcctacttctggactttcttatttattccattgatctgtatttctactttatgttaatgtcacactgttttaattacaatagactcacagtaagtattgaaagcagatagcataagacacccaagtttgtttttttattttcaagattgtttgggctatctaaatcctttgcatttccatctaaattataaatcagcttgttaatttccacaaaagactgatgggatgtataatgggtttgcattgaatctatagacaattttagggagaactgataccttaacatcaagtcttctaatctacagtcatgcatatctttcaatttatttacatctcttttactctctctcttcagcattttggtttgcaatgtacagttcctgaacatattatattaaatttattcttacatttatcatgggttttggtgctattgtaaatcatacttttaaatataatttaccaattgtttgttgatagtatattaaaatgcaattgattttttatattaactttgttgccttgactttaataaatgtattagtttttgaagctttttacagagttctcagaattttttatgttcatgataataccatctacaaataaagacagttgaaaatgttttctttctagtctgtatggcttttattacctttccttgacttattgcagtgtctagaaccccagggcaatgtgaatataaatggtgagataaaacatcattgatctatgcttgatcttaaaagaagactattcagttcttcaccattaagcatgaatagtggaaattttagatgtttcttaggtccctcttttcaggttgagaaaatttcttctatttcaattctgctgagagtttttatcataaatgattattgattttagccaaatgctttttctgcctctgtttggctgatggtatttttttcctttattcttttatatggtaaattacattgattaattttcaaatgaaaaacccaacattgtatttctaaaattaaaccctacttggtcatgatatttttatatatgatgatggattccattttaaaataatttatcatttttatgtataatgatgaattccattttaaaatattattaagaatttttatatttatattaatgagatattaatctgtggggttattcttttgtcttatatcttagtctgctcttggcatcatagtattgatattctcaaaaaatggattggtatgtgttccctcctctattttctaattgtgtctactagtagtatttatctcctaaatattgtatagaatttatgagtgaaataatctgggccttaagttctctttataaagtcttaaattacaaattcaagttcttcaataaccagggttattcagatttttctatttctttttgtgtctcttagataatttgtggctttcaaggaattcgtccactcactctaaattgtcaaattgattgtcacaatgtcgttcgtcatagtcacttattatcaacttaatgtctgaaggatctgtaggaattcctttctttaaaatcctaatactggtaattcagttctgctctctgtttttcctgataaatctagcaacaggtttcaatttttttaatcttttcacagaaacggagaagtattgaagtctccaacactagttgtggatttgtttttccttttgcttctggcaattttgtttaatgtattttgcaactctgcttattgggtgcatacatatttagaattgtcttgccttcttaatgaaccgaacattttatcattaaaaatggcccttctttatccttaaagtctacttcaaatgatattaatgaactcactccaattttcttattaccatttgcatggcagatccttatttatcctttcttttaacttatctgaatctgcagattttaagagcgaatcttgtagatagatacagagagttttactttttatctctaaaattgtatcagggtgtttagaccatttacatttaataaaattattgatctgagtttaagtctaccgtcttgctctttatatttctattggccccacctttcttcccttccttttttctcttttcctacctcctttggattaattggatttttaaactattttatatatcctctattggcttattacctatacttgttttccttttagtggtatttctaggtttataatatgtacctttaaattatcacaaacttcaaataataatatactacttaacatgaaataagaatcttaaaatagtatattcttccatttcttccactctgtctactgtactaatgttgttacacacttaactttcacatttgtaacaaactcaaaatacatgctattatttgctttaaagtcagttattttgtaattgaaactatataaaagaaatgttttaaatgagaagaatgccttttgtatttacctacctgtctttcaattttggcactggagattcaattgcatctggtattatttcctatcagcctgaaaaagtttttctaggaaaaaaataaacaaaaatttcttggggtgagggtctgctggggacaaattctctcaggttgaattggaatgaagtgtcttttttctctttatttttgaagaatattttcactggttatagaattctaggttaaccttttctttttttctttcaccagtaaatggggttgcttcattgttttgtggcttgtatttatgatgagaaatcagaagtgtgcttatctttgtagtgtttattttgtgtgtcttttttttcccctctatatactgttaagatttccttttcattactggtttttagcaatttgattatgatataactttgtgtagctttactcatgtttactttgctctgggtttattgggatatttaaatgtcaggattcataatttccagtaattttggaaagtttttggcaattatttttctcaaatatattttcttttctcttctttcatttcctgggacccccataatacgtaaattagaccacctgctattgtcccacatgacactgagaatctcatcttttgttgtgggggttctctgtgatttaatttagatattttctatagatatgtctccaaattcaacatacttttcttcttcagcatctaatcttttgtttatgtgtaatatatatgtagtatatatttaattttaagtattgaaaaattacatatatttaatttcaagtattatatttctagccgccaaaattccatttggttttccacttttaatatatttaatttcttttctcatacatgttttttaaatgcttgagtataattataatagcttttttagagtccttgtctactaattacatcaccttggttatttctgagactccatattattctggccttttttgtttcccaagtgacttttacttgatgctgaacattattttacattgttgagtgactatattttgtggtcttccttaaagagtgtttggaagttggttaaattgcttgcatatcagtttgattctttggaggcttgtttttaagtttattcggattggtctaaatctgtacttctcaactgatggtaatttttcacttctgtccccataggacatttggcaatatatggaggcccttttggttgtcaccgctacatggagggtactactgcatcaagttggtagaagtcaggaatgctagtaaacaatgcacacaacggctacacacacacaagaattacccagcccaaaatggattggttagccttgattactttctaccttcaggctagtttagccctactgctattgtaacacactttggggggtcgttgtgcagaccctgtgtattcaactcgatctcacctctctgttgtgttggaactcaaatatctcctaacactgaactctggcttatttattttctatttggtaatcattctttgttcacccttgtgtagtttcagtcagtgcacaactaacttaatattagttcaagtttcaagaagatgctctgcagatttctggagctcttttcttttaggattctgccccacaaattccatccattcttcctccccaaaatattgaggcttttttcctcaattcagcaagaccattataatctgcttgggttgaccctcctaaactgtagtccggaacatggcgagcagaagtccagagtgatcacgtggctcatctcgattgtttttttcctctcaaagatcacagtcctgtgctacacatcacttaatgtctgaaaataaattgcttcctatattttgttcagttttctagttgttcatgaaaggagaccaatctgatattaggtccttcatcatggctaggagtggaaatttgaggtgcatgttttgagaaaactgaagaaattggccagttttctcatttttgtatagtcagattggagttggcctgaaataactttttaaaaattaatgtttttacattactaaatactctcagtgtagcatctgacaatagtcagagcaataagggctgaaattgaaaaagtactgctgacactattattacagagaagcaaatactttttattcctttgatccttagagcaccttttatttatttatttattttgagatggagtctccctctatcacccaggctggagtgcagtggcgcaatcttagctcactgcaacctctgcctcccaggttcaagcaattctcttgcctcagtctcctgagtagctgggactacaggcatgcaccaccacgtcaaagtactttccacactctctcttttaaggtcttctctgcttagtagggaggggcagactacattgattcattccttctcaaatttactcaacaaattcattcaacaaatattgattgactacctactctgtctgggcactattctgtaaaatagacactaaaaaaaaaaacaaaagacactgttacaaacaagcaagaggagaagatgagaatgatccattcagtaattaattagagttgtagacgtcaatataaattcatgtttagcttgatatagttggttacactatagaaatggttacaaatagatggttacacatagaaatatttatagatatgtgtatataaacacattaatacacacacatacatttccttgctctgtcaactatagaatctaaatgaaataacattcagtagcaatgagcacacctagcacctagatcttggtttctaaatgctattttctagtacaaggagccaggactctgtggagaaatgtttgattctaggactgggaccggaatatacaagatgatcctggagcatcttgcattatcaaaaagtaagaaaatgctttaaaaagaagcccacaataataacagtatgctgaaggatacagaagcaaaccaaaagagctcccaggaggccaggctgaaacaatgtgagcaactaagttaggtggtattagattatagacaaagtctaaaatcaatatctatgatacatactgatataaataaatgactgaacaaataaataaatggggcacaaaagacaatcttctgtgcagaagaattccaaatagttatatagatattttgctttcacttaggtggagcataactgcccctccataagcatgagttgtgcatagtgacttccctccaaaaaccacagtataaaggaagggtagggggttagaatggtaacttaacagtgaagaaacctgacaaaacacaacttcagccaggtgctcaaggtcagtatcacagtgataaatcatgctgatggcatgtgcctttgatatgatgtgatgaaaatgacactttacctctgtggtctttttccccaaacccataacttcagtctaatcacaaaaaacatcagtcaaacccaattcagggatattttatgaaatacctgaccattaccgctgacaactctcaaggcaaccaaaaacaagaaaaatctgagaaacagtcacagccaggaggagcctatggagacatgatgactcagtgtaatgtgggaaccaggatgggagcctggaacagaaaaaaaatcaggtaaaaactaagaacatttgaataaactataaacttgaatgcacagtgatgcatcaatgttgattcatcaaaggtaacaaatacaacattctaccgtcatgtacgatgttaacaaatggggaaactgggtgaggggtacatgggaattctctgtactatctctgcaactatttaataaagctaaaattaccctaaaataaaagttaaaaaaaaacagttactgtctatgatcttataaacttgtattttagtgggagaaattgacaataaccaaaagatagtgacaaatactctgagggcggggaggaaagggaagggactggagtgtcccgggggtgataggcatgctgctttatatagggagctggggaagacctcaccaagatgctgaagaagtaatatgaaaaaaggcagagggaaactatgcccatatctgttctccctagacatggggagaaggagatgcaaagtccctgggatggagcatcctcatctgagaaatagcaaggaggcccctgtggctggagaagaaaggtgaataaacagacagtgaaaagcagaaatacagaaaggggaaggaaggagagcagacgacgcagaccttctggcatcttagcatatttaggctctcactctgaaggatattggaagccattagacggttttgaaagccagctgggcacggtggctcctgcctgtaataccagcaattttgggatgccgaggagggtggatcacctcaggtcaggagttcgagaccagcctggccaacatggtgaaaccccatctgtactaaaaatacaaaaatcagcttggcatggtggtgggtgcctgtaatctcagctactcaggaggctgaggcaggagaatagcttgaacccaggaggtggaagttgtagtgtgccgagatcacgccattgtactccagcctgggcaacaagagtgaaactctgtctcaaaaaaataaaaaataaaaagaaagccaaggcatgacatgatctgactaatatttttacaacaacattccagattccagggggcagtgaaactggttagccgactatttattgatgcaatccagctgagagataactgtgactctgaccgaatcatagttgtgatgcagtgagaactggccaggttctgtagccaatgggatttaaggataacttggaagtggagagtcacagaagggcaggtgccaaagatgcctgcaaagctgcaggtctgagcagcagcagcatgggggtatcatttactgagatgaaaaaagactcatccctagaggtgaagagcacatattttggagaaagagtttggttttagacaagtttagtctaaatgcctaaatgttagatgccttaatctgggtgaagatgtcaagggagttcaatttgactcaagggatgacagtttcagcatcagcagaatgtagatgatattttaagtctcgagcctggatgaggtcacacaaggaggatgtatgaagagagaagagaccataagtgtgcctatatgccaggcatgattctaggttttggagattcagcacaagcaaagcaagtacctcataccatagagtggatcatgtggctttgtgatactgtcatagcatgatggactcatgggttgaggcctatctccaactgatttaatcacattctctcatagaaaattcatattgaagcctgagcagtatataactccaggaagggggcagccatgtgcttaagaaaagagaaaatgctattctctggaggaagaaaaatgaataaaagatacatctaagaaaacaagagaataatgtcacttgacacaagacagcacctgaccaaacataccaagttcatgcaggacatgatctgagaggtgaatggctttgctccatgtgcgtggcacgccatggagttagcccaggtctccaaggacaaatgggccctcaagttcatcaagaaaagggtgaggatgcacatctccacaaagaggaagtgggaggagctgagcatgactgccaggaggaaagcagctgccaaggaggactgagccccctgccctgccgtctgcccaaaataaaagcttcacagaaaaagaaaaatgcatttctgatcccttctgaggtttgattacacatgtcatgtataggttccaagaaattcccctatatctttataataaattgtccacattggtgaactaacttaaaggagttcttgaagttccaacatttacaagcgatgaaaacatccacagacaccagaaattgagataggtaaaaagatagaggtctccagttgaaatctccgcagagagagcatcttctaagtaatccttttcattttactcactctagaattcacgttaccaacggacaacttaaaaatatgtttctgtttaagggagcaacacaaacctaaccaattaagagaattaaatacccaactgtcttgaaaggcagcattcttggggacaatggtacataagaaaagggaaccctgtccagcatcacagagacctctggaatagcaacttgggaaatcctccaggccaaatcttgcacacgggcagccaggaggacaaacatggccacagaggtcttgtctttcatttggcctacatcaagttaaataaatggggaccaatgtttaaaaacctaaaaaatgagagctcttgtacactgttggtgggaatgtaaattagcacaaccacgatggagaacagttttgaggttcctctaaaaactaaaaattgagttaccatatgatccagcaatcccatcgctaggtgtatatccaagagaaaggaaatcagagcattaaagagctatctgcactcccatgtttgttgcagcactgttcacaatagctaagatttgaaagcaacctaaatgtccatcgacagatgaatggaaaaacaaaatgtggtaatatatacaatggagtactattcagccataaaaaagaatgagatctagacatttgcaacaatttgcatggaaccagagatcattatgttaagtgaaataagccaggcactgaaagacatatgtcacgtcttctcacttatttgtgggatctaaaaatcaaaaacaattgaactcatgaatatagagatagaaggatggttaccagaagctgggaaggttagtagggggttgttggggggaggtggggatgattaatggtacaaaaggaaataaaagaatgaataagacctactatttgatagcataatagggtgactgtagtcaataataacttaattgtacattttaaaataacttaaagaatataattggattgtttgtaactcaaaggataagtgcttgaggagatagataccccattccccatgatgtgcttattttgcattgcatgcctgtaacaaaacatttcatgtaccccataaatatatatctatatatggggtacatatatatatatggggtacataaatatatatatatgactagataaatatatatatgactatatatatatatatatatatatatatgactagaccctggatttctcttgaaaatctgggtgatctgacaataatgggtctattttccccttctgcagcagccaggtggagccaagcagtggctgcctctctagacagacagggccatccttcacaatgacacaagcaccgggactcacacaatgtaagcatgggcttcattcatttacaccagtggttcccgactgaggataattttgtccttcaaggggcatttggcaatgtctcagtttttgatttttgacatttttgatcatcacatgatgggtgaggaggtgctacccacatctagcaggtagatgctgaggatattgctaacatcctaaagtgcacactacagcccacgcagccaagaatttttggttgcaaaatgccagcagtaccaaagttcagaaatagtgatttacaccaacttcttggccccttaggcaagtgaggttgtaattccagatgaagtccatttctcagaactcaggcaagactaataactatataagtacttccaaaaagcctactgtctctactcctctctgcttctctgagcagtttggacagtaagactcaatgattcaattgagacagcaacatctaacatctgtacacttgttatgtggcagacagtgcactaagtgaattcacatctacaaaccatttaagtctttcatcgactttacaaggtaggtattatgattttatgattaaaactgcattattgctggtggcagaaacccttctccagtagcctgtagacagaaagctccttgactggcacaagcagactacctagatgctagagcaaggtgacctggacatgagtcctgaccctgccatttaccatccctgtgatattgagaaagttgttaaaaccccttgggccttggttttctcatctgaaaatgggataataataataacactcacctcattgtattattatggagactaaaagggctcatgcatgaaaggtactcagaatggtatctgatctatagcaaacattcaaaaaagttagttattgtaactactattatttttgttgttgtgtttgttgttgttgttgtttgactaaatactcaggcagtaaacagagagtgctggttccaagttttcaaagcatttcatcaaatctctctgtttctctcttgttctcggctttgatttcctctgcaatttcattctcaggcagacccttcctaagtgttgacaattccatgaatcaaaactctacattcacgtcccagaagcttcgcataagcagtaagatccccagtaactggcccagcttgtgttattcttaaatcactgttgcagtggtgggagaagtaaggtgccctgatcagcagccctgtgttaattgtccccctggatctggggaagagtcaactcctctcacaccacatgaaccaagagtgaggaagacttactcctccagagacaaatggggatggtgtttcactatgaaggagaatgatccaagcaggcaaaaatgacagctctacaattattcccattttacaggaaattgtctcagtaagatgaagcaattttcacacggaaacaaagctattaagtgtgagaataagaatttaaatcatgacttccaaatatccaggaacaatttagtattttaaaaacctatatcaatagatcaaaagaaaaatgacagtgtcatcataaacgctgaaagacttttgatgaaagtcaatatcttttcttgatagataatctcttctaatattaagcttaaaaagcaatgagagagacttttaagaagactttaaatcgctgctaagggacttagaagacttggggaaaaaagaataattgcatgacgtcactttttgataagtaaatctatatatttaatattatttcaggagaaatgctatcacttttttgaactagaaaatctaattctaaagttcaattaaaaatatatcgataggaacagttaggaaaattctgaaacatattctaaaagtaaaatgattaaaatgtggtggtactagagcagaaaaaaacagatcaatggaatagaatcgagtctagaaatatggcacaaataaatatggaaatgtattatgtgacaatagtgacatttaaaatcagtttggaaaatactgattattaaatatatgacgttaaggtatcggaatagctgcctgattaaaaacaaaatgaaatcctgccctgctcattacactaaaacttatgccaaatgttcaagcctttaaatgtaaaccattaaaatgagctattatttactaaaaaatgaaatggaagaacttttatcattatcacaggacaaaaaggctcttctacaaaaacaacactacaccaagtagccatgaaagaaaagatgaatacatttaactatatattgttgtggactatataaactttgttgtccctcaaaaaagacatgctcaaaacccagccatcaggacttatgaatgtgagctatttggacagagggttttggcagatataatcaagttaagttgagataatggtggatcgggatgcatcctaatccaatgactagtgtccctaaaagatggggggaatttgtgtatgcagttactcaggaaagaaggtctcgtggagacaaaggtagagattggagcgatgctgccgcaaaccaaggaaggccagggattgccagaaaccagcagaagctagaggaagcaaggaaagattttccctagagcctttggaaggaacatggccttgccagcaccttgattttggacttctagctttcagaactgtaaaataatacatttctgttgttttcagccactctattggtggtagtttaacacaacaaccttaagaaactaatatgattattttaaaaaagaatttacatgggaaaaattacacaaaacaaaagaacaaatggcaaaaatctttgcgactcatataagaaagaactagttttcttaatatgtaatgagtttctgtaaatcagtattttaaaaaaatccaaccacttaatagaaaatggatacatgaagttgtatgatgttttcattgctttgttgagacaattaaaagaaataatttgtgtgtaacccaaatatgatgattatctaatgggtagcctttgagctttccttttaaccacatttagaatatacacagcatattatcaccttcttcctcattgctgtagtgatgaaagtagattttactgaagatattgaggggagagaggaagaggacttatatcacccactatgcaccaaaacatcatttaaaaaattaccttttaaacgcatctgttcatttctcaaagttccactatgggccccgacgtcttctagttctctttgtttttccttcagcctaacattcccaacactgcctctcaactatttttctcctttccctagtaattcaattcacagcttgcatgatctggccagcaaaacaaaagccaggcagttttcgctgattccatccttagaaaacagttcaggggccaaccattgttagtcccgtggagtcccatcaacccagtcactttgccttttcttggagcaggaaaagaaggaaagcttttgctgctgggaagataagatcttcttcagatggccacagatgtgaagaattaacccagtcggagccagcttcatggacatgccatctgcacagttccacggagaagggacctgtactttgggtaatgctctgccgtcttgaaattctcaataattgtcgaatagtgggcgccacattcccatttgcatggggctccacaaagtatacagtcagtcttgacacaaaaattattcagtaaacagttattgctgtcattactcaaagcacaaatgccttatctcctgagtaatccaagagacacagcgtctcaaagcttcatacttttaaagaaaaaaaaatttttttaaagcaaatggagaagaagggggaaaaaactagctgcatgaacttcgaagccaggaaaactggcaccattgcctttagcaagatgttatctgacatcttttggctgaatgcgtcctttcatggggtgattaagcagcaaatatctccgagtagcataatgtttattagacgttactctgttagggcagcttgtgttttccctgtattctgtttccgtattcaagtgtgtacaatttgttgatttaaataaaatttaaaataagccgtgttgcttgaagagctgctgacagggcctcgtggaaaactttgagaggttttttattaggaaacaattctgtttctgtgtcatgtttttctgccttatgcttttcccccaaccccctccctgtccttagcaccacaggacagcagcctgaaaaccaatatttttactttttttgaatgttcatctggctctctgaaatacttctatccacaaggcaaggattctacatgtccatcctgtctcctaggttattagagaaaaggggcaagcccgcttctgacaagggtcacctgcattccatgccaggagtcatgtacattctaagtgttagattttctggagtgttgatcattcatttattcatcatccattcatttattgttttcattaaccacatgtttaattgatggcaaagtacagagaagtggatactgttttatgtcactggatagaatgatgatgtctctttaaaatgaaagtacccatgatctgggccacgtcatttgttctctgcttgtgccctagagaaaccttcaaacatggacacagagacacgtgcaaggaagtacatcacattctttgggggaagtggaacaacaggaagcaacctacatgtccatcagcaaggggactgctaagtaagtgtgcaagagtgaaacgggatgtggtggtgaagaagaagaaaatagacctctatgtacctactgtattagtctgttttcacactgctgataaagacatacccaagactgggtaatttgtaaagaaaaagaagtttaatggactcacagtcccacgtggctggggggggggctcacaatcatggtggatggcaaaaggcacgtcttacatggcagcagacaagagagaaatgagaaccaagcaaaagggagaccccttataaaaccatcagctcttgtgaaacttattcactaccacgagaatagtatggagaaaactgctcccatgattcaattacctcccactaggtccttcccaccacatgtgggaattatgggagctacaattcaagataagatttgggtgaggacccagccaagacatatcacctacataaacaaatcttcaacacatattttttagagaaaaagacaagttgcacaaacatcttgtaccacatgaagctttttttaaacaaccaaaaggttcagaaaacacaaaactatatttgtattttctataggtacatacacatgtataaaaatacaaaggaaattctggctgttacagatgtgtgctaagaaaaaatttactagaaaattgtttggaagaaaagtcaacaaattgatacagtaccacagctggggaggagcgtggtaggggaatgtaccacaagcaccttcagtttatttgtaatgtcttatttttatatgacagtttattttattattttatacatttattattgcttaatgacaaatcaatattttagctgatataaaaaatcctctgtaaaaattcaaggagttaatattacctaatagttccccaatccatgtttgcttttatatatcaaatatacattgtaggcacactgaatttttatataatacaataccctatgtacgtgtccaataaatatcacttacaggcatggatgaatgaacaaaagctgaacggatacttttcccctccatcctttagaggtggaggctcctgaattactgttttaccacctctttgtcatatctgaaatctagttcagagaagaaaatcatgcaaataattagaattgccacttattgaagatctttctatatgctgctggctttaaagaattttactttcctaatattattttcctgttactattgctgcataaaataaaagatcaccccaaaaattagtggcttaaatcaaccattttcatgtattctcagattgtgagggtgaggatactgaaaagagcacaaagggttagctagtcacaatgtctggggtttctgctaggaaaactagaatactggaagtgacttgatggttgacagctggaattatctggaatgtctcctttcgtgtagctgacagttaatgctgaccattagtaggaacctcagttgggtctgttggcagtaacacccacatgtggcttctccatgaggctgcttgagcttcctcttaacaaggcagcctcagggtgcttgaacttcttacatagtagcaccagattccaaatgtgaatacctcatctaacaaggcagaagatgtaggatttttatgctctatattcaaaaggcatacagaataacctccactacatcccattggttataagtaagtcaaaagcctgtccaaattcaaggaaagaaaaattaaactcttcttctggatggaggcaatggatatgttctagaaaagaataggccaggagatctttttactgccatctttagaaaacataatctgccacatcttcataacaatcctcttctgcaaataggtgaataatccatcttatagatgagagagcaggtgcagagaatactttatttttccaaagtcaaattactcgatggcaagtggctaagcaaggattcaaactcaggtctgtgtgtcctcaaagcctcctctccccacccgtcactgccatcacatcaggtggatattatatttatgtatttcatcctgcttttattgcttatcagggagacatactcagataccaaatgttatcttatatagagattgcatcttcttgcaattttcagcccacatgactggttcaataacctgctcctcagtagttaataggaagccattgagatgagtcttttctgaaggtccagggaaattgctattaagagaccagagtttgagcagtgttggcaacttcaggatggtggctgatccacagtgatcgctgactccggtgaaaaatgatcctctgtctatgtgacacaattatttgggtatttaccacaaaggcccttagataggcccctttcaatcagaaaataagaaataagctgagggagaaaaatagctaaatttaaatgtaactgctcacattgttttgtccttagatggatggtaggtctctctcattattcaccaagcacagacatgctaccaagagtgatttggcaacttgtgaagataaatcacaaccaggatggctgctgtcactgtccagttgagaatgtgactctggaggctgacagagtgtgggggcaagcacatgcatgggtcccactggtgcaaagtttgagagaaaaaggaggacccagagaaaggaaaacagaagaaaagcaataaaaataccatgtctcccccgacattgttcccaagtgccatgctttcgagagaacaaatgtttctgtgagtccccagcaggtcagaaggaagacagatggcaggttaccgaagcaggaggggaggaggttatgaattcaaccgtcaatgagaagaaagcacagatttaatatgtagttcaggagaaaatggaagaaagcagcatgacactctaagaatctgaagggagttgtattttctggatatttttggatgaaatatttcatacatgacacaaagccgagatcctccaaattaattttgtttattctatttttgtaacctatatttttgtgatcttaaaagcaacaccttctaataatgcaattttttgcaaatatagtaaaatgcataaaaattcatactcattagatccaggagtaaccaatgtgaatatcttgttacacagttttccagtttccctcgtgtatatgtacatagaactatatgtcctgcaaaaatgggctcagataatacctaatgttttgtgttctgcaattttcgtttcttatatcacaagcttctttctatgtcaaaaagtagacatttacataatcatttaacggaggcttaatcttccatggtaatattagttaatcaatccactattactgaatgtttaggactctgaatttttttctgtttgcaaataataaaacatgaacatctttgcacatatacctttatgtacttgctttcttctgatatatttctcaaggtgttttttagtaagatgagaaatttgtatacatattactaaattattattttgttaagttgtaccaataattatctaaagtcaaagctaaaaagatgcaattagcttttttctttctttctttcttttgtctttctttttctttctttctttctttctttctttctttctttctttctttctttctttctttctttctttcttctttcttcttcatttctttttttccctgttcctcttccctgcctctttctgtcttcactagtcagtaactgctattgttgaagcaggttattttgctcagggaacttacagatgagggcaggcattggaaactgtggcccatgggccaatcagacccaccatcaatttttgttaggcccataagctaagaatagtgtttttattttaaaatggttgaaaaaaatcgaaagaagagtaatatgttgtgatacacacaattatatagattttaataagtttcacttaaacacagtcactctatttctttacatattgtctgtggtgctttcaccctgcaacagcagagttgagaagctaggacagataatgtctatattgctcacaaggtaagaaatatttaccatctgatccctttgtagaaaaagtgtgtggactcctgggctagtgacaataatgtttctagctttcactggagaccaggagctgtcccaggagaacatcatagcagcagttaagagtgtgatagtcaacaggtctcctgggttcaaattccaggttagtgacttactaactgtgggaccttagactcattgttaaaagtcttttgctaaaacatcctcaactgcagaaaggaaagaataatacatactattgacaaccaatattatcaccaggatcaagtaaagggaggagtaaaaagtgtttaccataagagcctagtgcatggcaaaaaaactgttgttactatttgctcttcacttctggaaatttaacttaaaatttgttcaaatatctttagtcctggaattttaatttattctgttattctttcttatccttgaataatttttggttccagaacagatggtgccaatattatcaaaataaaatttatagtttgagaagacttcttaaatggaataagaaaaaccatgtaccattatctttttctcttctgtgattcaagtgcctcttcacttacttattcatagataagatatgttagaataatttactttcaggtctcaaaagaatggggaagctatagcaggtgcattatgggaggtagctggcctcattgaagatgccaacttgcctcaagagttagggttaaaagactctctagtctagaaggcatatgacccatcctcagtccaatgcctgaagacatcagttcacagccatgcaccgaatattacagcttaccatttaagatagtcgtccttatttgctgttctgcatatatccctggactgggcagtttgtggacatggaaaaacccaaagtggtgttctctctaggaatgcacagatgctctttgacttatgatgaggctgcttcctgataagcccatcttaaattgaaaatacggtaaatcaaaaatgcatttaatccatctaacccatagaacatcatagcttagtctagtctgacttaaatgtgttgttttacttccattagcttatatgtggacaaaatcatctaactcaaagcctattttctaagaaagtgttgaacatctcatgtaatttattgaatactgcactgaaactgaaaaactgaatgattgtatgggtgctcaaagtacagtttctattgaatgtggatcacttttgcaccatcccaaagtcaaaaaatccaaagttgaaccattgtaagtcagggactatacacaaatctctttcataaacttgaggcagatcttgctgtatctaaataaagctctctctgagcataatttaagctcattctttcttttaaaaagtaaaagcattaaagtgaatatctcttaggtgggcagtgagcacctcacctctactgggcagagttgggggtatagagatggaccaagctcttcagccatgctccttgcatccctgtgtctgatcatttagtttgtccggcttgaacactacgtccccagggatggtttccccaaacatcctgtctgcaggggaccttgcctctatttcccaaaacagcccagtgtatgtctttcagagcactaaaaatatagattatttctttgtttaatccattgatttgtttacagtctatgcccacccccattgtaatataagctccacaaaggaaaggtcttgtctatctcattcatcaatgtcccaacacttgtacagcattggtgtgaataaatacttgtcttgactctcaaattacccacaattttgttcctcattaagactgacccctactccctctcaactattatctctcccttcattctactaaattcttgtcattttcttgacacacagatatctttttcttctatttttcacacaatccatttcttcacctaaaacatcttttcattctccccatttgctctcccccacttcttggctgaccacctcttagctgttctttaggtttcagcttctagattacacccagcaggaatccttccctgatcattctccatgcctagggtggagagttgcctctcttgaactcccctgtgcccagcacacttctcatcatttctttcaccccaaatggctattcttacctgctgagttgtctgtctccccaaccagaacagcacagttcccaacgcagtggctggcaggtagttggtgctcagtgatgtgtttttaataaatgaatggttaggttgggcgcggtggctcacgcctgtaatctcagcattttgggaggttgaggcaggcaaatcatctgaggtcagaagttcgagaccagcctgaccaatatggtgaaaccctgtccctactaaaaatacaaaaagtagccaggcatgatggtgtgtgcctgtagtcccagctactcaggaggctgaggcaggagaattgcttgaacctgggaggcggaggttgcagtgagctgagatggcaccactgcactccagcctgggagacagagcaatactctgtctcaaaataaataaattagttaattaaatgaatggctaaacattgaagaattattaccctatatccataacactaacccatatttttaacagtgtattagtccattttcatactgctatgaagaactgtctggcactggataatttataaaggaaagcagtttaattgacagttcagcatggctggggaggactcagggaacttacaatcatggggaaggcaaagaggaagcaaggtaacttcttcacaaggcagcaggaaggagaagtgctgagtaaaggggaaagatccccttataaaaccatcagatctcatgagaactcatgccctatcacgagaacagcataggggaactgcccccgtgatccaattacctccacctggtccctcccttgacagatggagattatagggattacaggaattacaattcaagatgagatttgggtgaggacacaaagccaagccatatcaaacactgagaagaaggtatgtgttattcattaaacaatagtaagaactgatttcctcaacatacaaaaccttccaagaaatcattgaaaaagaaacagaatagaggcatatcatagacaaatgacaaaaaaagaatatacttcataaatacatatatggcaagctgcttaatacctgactcaagacagatgtgaattaatattctactgggagaccgcattttcttttccaaattgcaaaaatcaaatggtttgataataccctccctgagtaatcgaatgggaaaacagatcttctcgcttatgaatgatgggaatgtaaattcaacaacctctacataggacactttgacaatatttatcaaacttacaaatgcacttacccttggccccagctagtccacttctaggtatttattctgcagagaccctcccacatgtgtggcgtgacatgcattcaaggttattgactgcagggttgttggtaagagcaaaactttggaaactccctaaatgcccctagattcagggcactgaatgaataatttatgctacagccacatattggggtgtattacagttttttcaaaagacgatgctctttattaatgtatgtgggatgatctctaagataaaagactttaggttttacaaaaaagtaaggcaaaaagaaaactatgctatgtgtataatatatgaccatttgtgtaaaaaaaaggagaaaaggagaaaaggggtgtgtgtgtgtgcatgtgcttaaatatatatgtacttatttgtgtaagcataaaatacctgattaatacgaaatttgagagaaggggtgaagctaagaggcaaggtggcaggaaggctttttactcaataatttttaatgatttgtagtttagaattgtgtgactctattatgaattcaaacattgggagagggaggagggacagaagagaaagaaagggaaggaggaagagagcgagagggggaagggaagagaaagagagaaggagtatgctccaaaggtcagtcctaaatcaggtagaacaaactaagttgctcatggtaacgaggttaagcatctgccacttcatgttccctttcttcctcagtagttataacaaagtagaaaaatcagagaggcaaatctcagcctctcaccccttttgtgagtctcctggtttctctgatgattctgcaataattagcaagagctggatgcatgcttctaaatctcatctagctggtgacccaagagatggatcccaccacatccctagccatctagaaagaaactcaccaggctctccttcctggcctgtctgaagacacagcccctgttcctcgggagggctctgtgatgtcgatttatgtagcagcagctgtcacagctcacttcagcagaaaggattgaactgtcctgaatatgtcaatcagatatcaaagataaatgaagtttgaaaaaataaaatgtacaatttatttttaaaaaatagtctttgggagacacccagaatgcactttgaaaaatctaagggaaatgtgtcatgaaaacaaatccacattctgctgtccaactttaatttttcactgataacactcgagcaggctgcagcccagccgataaataaagatgctccaccttaatgttctccaattgccatctgctgtgatggagggcctttcccaaagatgcacttgccccttgcacttcagctctgaccacctccccctccaggtcctctggatgttaacgagcaggcacagtcttcaggactttcccccaaggacatcctatgcctgctgctccaggaatgcatttgccaaggaatccgctaagctgccttggcattgcgtgctggttgggcttggtgatgtttggggttttaattcactttactaaaattgcctttcattcacttggtgacaggtagttatttgttttcaggattccatttgacatttattgttagcgtaaaacactaataataataattagcgcctttttagagttgtctggggttttcatgccattgcattgttactataaaacatcctgaggcttttctgtgtataagatagtatgatggtatttaaatgtaacaaaggggtttattatactcaggccagattgcagtatctctgagcccccctccctgtgagcaagccaagacttcatatcctcccaacttgtctgcaatgctaatacctattttttttttgagatggagtctccctctgtcacttcacaacatggcaaaaccctgtctctactaaaaatactataaacatatataatatatacacacacatatgtatgtatatactatatacacgtatatgtatacatatacatgtatatactgtatacacacacacacatatatgtgcatactgtattttattttttataggagggaaacctcagcatggtttgacttttttcttagaaacaagcaatccaatctaggatttatgctctaaactatgccgtcacatacagtagccactggtcaattgtaactatttacatttaatgtaattgaaattaaatacagtattcgattcctctgttgcactagcttctttgcaagtgttcaatagccacaagtggtgcagggctaccacactgaacagtgcagctgcagaccacatccagtgttgcagaaaagaaagtcctactgaatggcactgctctagaacctggattctagaaatgtggtccaaagaccagcaacactggcatgaggtgcagttttgttcagaaacacagtctctagttccccacccccagacctagtaacaagctccccaagtaatgcatttgcacacttatgtttgaaataggagtcagagaagtttctgcaaagagcccagcagtaaatgttttgggctttgtgggccatacagtctctgttgcaactactcaactctggcattgttgtgacaaagcagctatagacaatacctaagtgaatgtgcatgattgtgttccaatacagctttatttaaaaaaacaaatggcagaccatatttgtcccacagcccagcatttgctgaaccctgctccagaacattctttaaacgtccctgtaaatactatgagtatcatttaattcccactcttggatctcgaagactaagcatctctgatcaagcatctctgatcaagcatcttggtctacgatcctgggagagatacttttctggaatgtctctgttggcttgtgtctctgtctcttgtttctaaagaaaactgacccatctggccaactagaagctaatgataaaaaggccagtcaaagtggttcacacctgtaatcccagcactttgggaggctgaagcaggtggatcacctgaggccaggagatcatgaccagcctggccaaaatggtgaaacctgtctctattaaaattacaaaaaaaattaggtgggcatggtggtgtgcacctgtacttccagctgctcaggaggctgagaggctgaggcatgagaatcacttgagcctgggaggcagaggttgcagtgagctgggatcatgccactgcacttcagcctgggtgacagagggaggctctgtctccaaaaaaaaaaaaaaaaaaaaaaaagaaaaagaaaaaaaaacttaatgataaaaagaaggagagtggacagagctgaccatgctccacaacgggacctaatcaatatgaaaaggagggcgtcaggctgcttttactctctgccacacataccccagttaaacaatatgtgaagaggtccctgagctttgatgtaagactggcagggtcagttccaagttctgatatgtgctttgcccacctgagcaagggttcaaggaaccacgaaagaggtggacaagcgttgaggtctggccctggcccagcccaggtttgcattctacacagaaaacatggccacataaaagagaaaacatctgttaaggtccaaactgacgcagaaggtgtgtgagccatgtgtgtgagtacttctcctaatcacagcaaagcggctccccttgcacatgggatggaggaaaggccaggagttccctcttgacttttctgcaaggcccagagttcctttcccatgcatcaaggtgagaaggctgaagaagaggaaacatctcagaggattatctcaaagctcccactagattcaggatctctgccatggatgtttgataaactctacttgatgatgctcaacttgaattccatgagccaggaacgtctgagtaggaaagagatatgtgaattcaaggaaaatggcaatttgttctttctgtttctgccaagttctggatgaaagataagtctccactctaccctctgccaggttccatgaaggataaaatggagatggagcacagagtatgtgtagagataggttggccctttacagtcagacaatcagaattcctgtgttcaaattccagattggccacttgttagctctgtgactttcatcaattcacacaatatctcaaacctcactcttcccaactgaaatacaaaataaaaatactacccaccttggcattattgggaggaataaatgagaccatagacaccaagctaggtgcacagcatagcgcatagcaagtgctcagtaaacaccttctacaagaattatgtcatatattcctcaaacaaccacacacagtaggaattaaattctcactttatagatgatgaaactgaggcctagcatggcgaaataacctagatgagaacacagaggtaataaggggtggtgcttggatcagaatgcacacatttctgcaagcttcaattatttctacttagctgtgtcatttattccagagaaccacttaaaaggtgtttttttttaggatacttggctccttttttttttctccagaaacaccctacctgtcctttaaaaaaatgatcggatgctaagtctggagacaccatgctacctcaaagacccagtgcacaaactggccctgctccagggctgtgaacagcaacatgacaaccaagggtgcccctaaattagttggtgggaaaatcctggcctcccaatctaagcaataaaatcttctaatccaaagatcatcttctcttcaaaatcactcagaaaatgttgtccacgctacatgctgtccacaaattcatcattttatcattgcttaagacaacgaacaagcccaaatctgccgctaaaaattctaaaactaagtcctagcatcacacgattgccctaaattaaagaatagagtgaaaaggaagatatgtaacaaattttaaaagcgaataactctttgatccaacaattcaacttttagaaataccttttggaaataatcagacaagtatacagttacatgaacaagactgtcagctgggtgtggtgactcactcctgtaatcccagaactttgggagacaggagggagaattgcttgagcccagaagtttgagaccagcctgggcaacatagtgagattccatctcttaaaaattttgtcttaattagccaggcatggtggagtgctcctgtgatcccagctactctggaggatgaggtgggaaggtcgcctgggagctggaggtgagcctgggagctgacggagctgaggagagccatgatcacaccattgcactccttcctgggcaacagagagagaccctgtctcaaaaaaaaaaaaaaaaaaaagaaagaaagaaagaaaaagaaagaaagaaaaaaggaatgttcatttcagtgatcctaattgaaaacaatctaagttatgctcatttgggcattggagaaataaacaatagaacaatcatttattaaataccatctgaccatgaagaaggttggggagattcctattgctggattgccaacaatctacgaaatgaaaaaggggtgttcatcgacttcccgcatccaaaacatcatgacatgtggccagccacatcccctcagcaacccctcgagtgaccacgtgtcacgacggccatcatgcgtttacctccacgtggaagcatccctctctcttcctcctctttcttgattgctcctctagcaaaaaagtcttcacacaacaaccaaactgagcctgtagaaacacaaaccagaggaggatacatccaaaccatttcctgtggtctgcgaagctctatctatgctggcctctgcctgtcacttacagtcatctcgccctacactccaccccgacactggctgtcttgctgatccttgaagcaccaatgtcatttctatccttcagcctttcaggggctgttcctctgtaggggattgggggtggggtgggactcatttcctagctctaaaaagcccaactgcttcttctgtcttagtttctctccaaatgcccccttctgagagaggcgtttagtggttaaaatcacccgcccaccatgccaccatcattttccattccatgagccatttttttcctttatgaccatcttaccattcctgtctttatcttacatgtaaatctatttatgtgtttacgctttgtcttctctccagaatgtaagcaccaggaaggtgcatgttacagatgtctctattcccagtacctgaaaaaccacctgccatagaaactcaataaatagtttattaaataaacaaataaatttgtagggtcacataccctttattaatagtgaatatacacaggcaggtagaattgtagatgtcttattcttttgttttatggtctgctttttttctggtctcgaaagagcaaaagttaattttgtaattttgaaaagcaatttctcttatcttaaataaataataaataaaggagccaaaatagaatataacccttcaaggagccagtaagaacctctcatagcccacttttccaatgacatctcaattggtaatgggtctttcttttccttttgagtcaattttggacacctttccttgaagctattgttagtttagaaaaagacaaaaaagttaagtttaaaagagtcagatgtataatttcttatgctggagtttaccagaaagacttggaaggtaaactcaggctttttgttttgccagggttgggttatattaacttaaaaaaaaaaaactaaaacatcttggtcttaaagaaatgtcttctagtatagacttcttctctattgagctgttgttttaagtcccaaggacttggaaggtaaatttattctctttatcttgccagggttgggctatattaactgtaaaaaagaaaagaactaaaaaatattggtcttaaagaaatgtcttctagtataaactctttctctattaggctgtagttttaagtcctgtttaaatttaaatctctgttcatctccaaaataatattgactgcaagacaaaggatgactttggcattttcaaatatttttgagtgtgtaagtccttgcaggaagaagatagctgatagtcatctgtacttaagaggacctaaaggaggctcttaaaagaattccaaagcccaaaagtaaaaaatgatgacttcatcctggccatgccccttaggagcagcaatttatctgagaactttgaccaaaagtgagagactcctatgtaagcctagagcaagtgttaactaaacctataaagctaagtcagaatctgtgacagcaaaggaaaattctattacctatatgaccatacctttttttttcaaaagcacactaacttgtaatgattggtggcaaatgttacatctgtttattttcagaacaagatgtcaatttaggaaaatgttttaagccagcactggtgaatatcagtctcatgaaagagtatgattctatggaatcatttcacgtggaaaatgcccacttttatgcaagcatctgaaatcaccttctacatccttttgaggattttccaggagaaaatatgtgtaatattccaattgacatattagtggaagcatcgtagacttcatgggcaacatggaaaatatatattttttaacatatctcagaaaactttgcagcactaaagttaaggaatgaattcaaatgctccgaaaacattcatttattttcttctcaagtttcctgaaacaaagtgctcagatgaaatatttgactacatgaaaccatttattttggtagcatttccaccattaaccttagatcatctcctaaagacagccaggaaagaaacaaataaacacagctcattcatcatgaagcgtgataataggacattttatgaacagagtgctttctattcagaaagaaaccatgtaattttaacaaggtacacagtgggtattatccagccaagtacaaagcattcacctcaaaatatttattgatattatttatactataattatcaaaaaaataggctgagacttatgattgatccagaatagatggatgcttgcccaacctttacgatgatcctttggccctgaaatttaccaaaatgtaagtgtaattatttaaattaagcaattccataagacttcagtgaatacccactatgtttctaggcagttccaggtaattcaattgatttaaatattagacactgtttctgccatgtgatagagaatagaaaacttattccccctcctcatgtctccataagggagtttctgttccttgaaagagtattagagtaaggcttctttctatgccctcaatgataacaatgcctaaattgatgaaagaggtgttgcatcttcataagcctggcctagaatcccttctttattctaggccatccagctcacatggtggatacattctcttctttcttttgttttaatgtagtttttgttcttgagtggggccctaggccttggcagcaaaagtccaatctagaaactctcttgccccagtattggtactcaacaagtgtgaagcagtcttttctttcagatagctggatgagtgaccctgaagaccccgtaaaatgtagattgtaatagatttgttgaaaggataaaatgaactaatataagtaaaacatttagtttactattgggtaagagccccattttcctactctatgtgggttctgagctacggactggggaggtattgagaatccagattaccttagaacataagcttcatgatggcaggaattgtgttgttatcacccctaaaatttcaagagctagaacaaggcatgtcaaatagctgatgctcagaaattttatcaactgaataaattatctgttgtttcaggaccaggccaaattcttctactcactttgtcttacctcaatcttcatatctctgaatctattgtcagtttcttaattggttgtgagtttggtgggagatggatgtgattcattggcccccttaaacagcaccattgtcaataggccatgaactggctggaaaacagactttaatatgaaacaataagagactaggaagtgccatatcatattgatattgaccattagtgcaatagggactcaatcagaaaagaaattagtgaaaactattgtggtccagaactttgagctaagctttaagataatgacagatttagacattcagataagtaagcataccagaaattcactgtcattggctaagggaagggatcccttgtatcttacttcttattgtatcacaatgtctagcacatagctgactcactcaatagtagttgaatgaatggtattggatgctaacgtcaaatcagctagctgaatagaaggtagtagaaacacaatgtctttggagcataacagagctgcatttgaattctagcttcactatttaataactttataacttaggacaaagtggacttaatgctcttagtctcatgtttctgatctgagttcagcctctccctctctctctctctctctctctctctctctctctctcagtttcctttgcaccatgggataacacagcaagaaggccctctccagatgttagaaccttggtctttgacttctcagcctccagaactgtgagagataaatttctgctcattataaattactcagtctattatggtattctgttttagcagcacaaatggactaagacagtatgttaccctgatttctgctggaagtgccactggctgacagcttcagctctcaatgtaatctgggaaatggcctcagtcaatgtactatgctacaactggctcctattgtcttgtaggggtcaattgtggccatctgtttccaattctgtgttcagttggcagccagaaatcagccatggtgggagtatttatgcaaaaagtcagcattttttttctgaaagggccagatagtaaaaatttatggctttgcaatattatctgttgcaattactcaactccaccattatagcaaccatggataacatgtgaacaaataggtgtagctaacttccaatgaaactttatttacaaaatcaggtggtagaccagcagtctgtggcttgtcaatggtttctttacatcatgaaaattagtaaacattacaaataagtttttttcaccttcagattgacagttgttaaacatttaccagtccatcacaagaagtcaattcgcccaaggtcacattccttttgcaagggcaaattgaaactaatgtctgtttaatgtggaaacatgagattaaaaagcagactcttggtcaggcgcagtggctcatgcctgtaatcccaacactttgggaggcctatgcaggcagatcacctgaggtcgggagtttgagaccagcctggcaaacatggagaaaccctgtctctactaaaaatacaaaattagctgggcatggtggtgcatgcctgtaatcccaactactcgggaggctgaggcaggagaatggtgtgaactcgggaggcagagcttgcagtgagccgacatagtgccactgcagtccagcctgggcgaaagagcaagactccgtctcaaaaaaaagaaaaacaaaattagctgggcgtggtggtgcatgcctgtaatcccagctactctggaggctgaagcaggataatggtttgaacctaggaggtgggtgttgtgatgagctgagatcagctccattgcactccagcctggacaacaagagcaaaactctgtctcaaaaaaaaaaaaaaaaaaaaagcagactctttgcccaccatcttacacaactaagaaagttcatcccagcttaaaatctccctgtggggtagattgaggacattgttgtgattgtattgcagcttcatttctttgtctgcataaccctgcttcattctcttctccttcccccagcatctgtccttacctcccttcctggccaccacagcacaccaaaaattaggattaagttacaccctgtcctgctcagagaagcacttggcccactaagggaggaaagggactatataaatatgccagaggacttagccaaaaaaattggcaggagttgggagagtacatatgaaactagactctgaggatgttgttaatcaaggaagtggaaaatccagttaggtaggaaagagtttatcaatatgggagcattcctccagaatatagcgtttgacacactatcagtgaccatagagttggaactaacacattggtaggatatattttttaccactctaagggaagcataaattccagagtcgccacagcagatattccagttatgaatttgcctttcctacccacagaccctcagccagacacactgactgagtgcttatatagtgtttgatctactaatacgtgatcacaccagaggacacagcaagagactcttgaattaagactgccacttggacactcagagtttcttgtggtcaaatgcatgacaggcaagaaaagcagtcaccatcctggttgaaaaagtcatgattatcataagcttagacccttaaacatgaaaggtggaatgacccagaatggcagagttactgagagtgagggaaatctaagattacacaaaagaccatgaggacaagttgtcgcctgaaaaacagctacagtggcaactagttcattatactgtcttcttcctgtaagtttttccaaaacaaaaagtcctctcagaaacctagagctgcctatatagaacttatagaaagaagaggatctgaactaaaggggtggactgtagtggatgctgtgttgcactgccctgaacctccagttaggactaaaggtccaatttcaccaggtgaaaaaagttttgatgtattatggctgtgagttctctctggaaatggaagagataaagtcagaaatccctgaatcccatagctatttgatgaggggataaaaaaggaagcccctcttgccccaactcaagacaatcctaataggtcatctcagttcaaagctttttatgggattagctggggccattagtgttactgcaagcaactccaattctctgtctgtctattccttcccttcccccacagatgttaaaaccaagagcactctctaatagatattcatactaatctcagttacaaagttggcttccttgggaaccttatctgaaacatgattaaatgaaatgatgtccctaaagtgccagacattaaaaaggatcttatgatatgtgggtttgatctcataatatacctaagaaaacatgagtttcaagcaacagcattaaaaatggtaaaaataacaacacctattattactaagtgcttactcaatagtaaactaagtgctttacatacattaactcatttcatcctttcaacaagtctattataatctacattttacagaaaagtaaaggaagcacaagggagttaattaacttcctcaagttcacttgcttatccattacactttaccagattgggtttgaatatggctctaaaagagacatatttgtaagagaagtttcagaataatccctttgctttttaagtcctgtcagcctaaaatttgagccatttaaagatggcaaaggttttctgctattgtacatgaactcatattcattgaaaaatctcatctgaagtaattctgagaggggaagagaaactagtcatttaaagaagtatattacaaacaataaacagagtctataatattcctcattcttggaaaacacatacatcataggcataatgtgtttctgggatataaagttgtgtagtgacttggcattaaactaagaccccaagttttattttacttcatccaaataacagctggcagatgactgtccattgtgaccatgcttggctgaatttcagtaatgatgggagaatcaatattcctgctatttcacataacaaaatgtactgtgttcagttgaggtggtgtgggttctgtattttatattgccagtaatcaagtcaatacaaaatgatgcagtaagtgttcagtgagtgttgaccataagctggacactgtgctaggcactagcattaagaacacagcagatgcaacactttccttaaggagcttacagtctaagtacatggatcttaaacttcaataatttccatactactttcaacattgttggcatattcatatactgtatgtactacagtattctcactgtagctttaatcatctgcttttatttaaatttacttaagaaagtatatagcacctctgaaaattaaaaggagttaccccttgccacaaagagaaaactttcatataaaccaatataaaaatataactactataactagttttttgagattaagtgtttaaaaaaaataaaatcattgtgaacttctctagtgatgcatgtgccacatttactggcctcatagaaggaggtaggtgtgaggagaaagtaggaaaatgaatggctatttgatgcaatatgataaactggtaaagaacatggaacctaaagctaaatccatttgattcaaattttagttctggcacttagcacttatgagttacataacttcaggaaacctttctgagcctcaatttcctcacctataagatgggaataacataatgtttaattcttcgggtgattgtcaggattaaattaattgaacagcttagagttgtggctagcacatcattaccataataaaaaggttggttattattgttagtattgcagtataccaagttatgggagggggtctatgcagggtgattctcaattctatcagagggacccaaaaaaggcttcacagaggagatgcccatatacatgactgatgagtaggagcttatccagcctatgaagcaggagatggtgatcattcaggcagaggacagtaagctaaaatcacctcattttttctcttctctgatgcactcaattagtggacaccttttggttttgctgcccccttttctccagtgatagcactttgatctttccttggatagctattctttgctcactcttggcacacaaagatagggtaggactgaatccactcccagctcctgattgggcatgtaagtcggatctgtgcaaccattcatctggctgtggagatgagtgtggtcaaaattgaaccagtcaaagtgaatctcaggaccctgtatggaacctctagaaagaagagtactattggtttcctaggactgctgtaagaagtaccacaaacacttctttttgttaagagcaacttaacaaaaaattattatctcactgttttggaggccagaagtccaaaatcaagatgttggcaggccatggtttccctgaagacactggagaaggctctattccaggccactcacctagctagttggagttcattggcttgtggcagcataactctatctttacatggctttctcccagggcccccggacatggctgagtccaaatttatcctttttacaaggacatcagtcatgttggatcatagactcagcatactccagtatactccagtatactccagtatgactgcatcttaaccactcacaactgcaatgactccattttcaaataacaacacattctggggtattgggtgtcaggactcaggaatctggggagaaccacagtgtaacccataacagagaggttctcattacacaggatttaaagttgataatagataagtctgatgcttctggggattctagatgggggagaaataccctccctgggaataaagccaactcagaggaaatgagaactgagagacaacaaaacaggttcccactgtcatcatctgagcacctggatccagctatgcctaatttgatccctgaacttttcaggtacaggagccaataactccctcatttttttaaagctgacattagttagagttgggtttctataacattgaaataaaatagtccagtcgaaaataaaatcttaagccacttagaaattttaaaatttttataaataaattctaggatccataagagaaaaggataggtttattaaagaaacaggaactttaaaacaggtttaagccagttttgaagagccacccctttctagacacatcctttgatatcttgcgtagtaactgttagtagtttgtgacatttctagtctgtcctgggtgttactagtagctgacaggtcaggcctgtcacctccataaaagcaatgaacatccataccagcaaactctatggtgtggagtccctttgagaattactgatgtcacactaaatctcatcagctgtatttattctctcttcatcactgccatttgaggctcttcaaaaagaagaagtctgattatttttacatgaagatagcttctccctgctcctgtgatttgaaaattgtaaaccaaagcttaattctaggagagttcatttgtcctcatggcaagtataattaaaatataaatctctagggggaatacctggaaaattaaggttattgttgacattattattaattaataattatcaaatactcactttaaaaaatgattagcctttagattttgatagcctccattatcctcattaggtaatagtgaaataaagatgaatgaatcctcaagctgatgaattaatgattaaggcagtccagaagaattcaacctagattctgtatccagcaggcttccgcatcagcctgtggcattctcttagctggttagattttgagtaagtgttcgaatgagattaactcttagagcagtgatttcatcgggagataaagtctgataagtaaagaagaaaaaatacaaaaccacattaaatcctttcagcaatatcccactgagggtccccagaaggtgataccagaatacagcctgcatgaggtttctgagacacccttctataatcttgtcacaagcaaaagaattttctaaggaaacatctaatgatgctgataagaaccatgcacatgaatcaatgaggaacctagacctcttggtttagatttggtatgacagtattgtgtgttaaataaataccaataaattattaaaacatattggttgtatcgtaacacagagccttaacaatgtattatgtcagcatgtacagctctcgctcagggaaattctccatctctttaattcaagcattgacattctgtgccagcacaaagcttttttttatttgagattgacacatgtctaaaattgcttagattttgtgttgtgctcttaatacttgaaacccggcaaatgaaattctatgtcactgtgcatgaacaatgccttacaaaaaaaaaaaaaaaaaaatcttagcctgggggttcaactagaggattggagaaacaaaaagtgctttcactactattgcttcaagttgggggaataattactttgctcgaggaaaagggagggccattcctagccccttgaaaaaacagtatgtttgtcaggccttaaattagatcattaaattcaagaagggtgttgtatatggatcctggtcatgtcaatgtaagggctgcctgtgtcatggtgaggatgttagtcctcatctggtaactattcaggggagcttctttgctcctgttttattctgacatgcctgggtaattgtggtaaccctgatgaactctcctttctctacctgaggataaacttcctccagtttactttccaaaggcatgattatgccttctactttggctgtagttttattttcatgggattttctcaaaataacatttcaggcatcaagcattacttaatgcccttgaatgtcaccacattactaatggggatggggagtctggccaaagctgggactccctaggtgagtatgaatggcaaatctcacgtagcactttggcatttagcatcttatatctacaaggttgtccctatattcagtttttgatgcaacagttttgtttcattctcagctgttgggaagaaaagaaaaggagtttgcttaagattgaaaatctttttggactgtgatctagatgcctctacgggacaatctggggccataagcataatgagcacacactctttaggaaggaatttcgaccttttctgccttactgctcaatatccatttcccatcctccagtgcactaaacagccgtcccaggtgacctcgcatttccccaataagccgttttgtttcaagcttccgtgcctttgcacacgctgtttttgctatttgaagtgctttccccatcttttgagaaaattcctatccgttctttcagaatcagctccagaatctttatgagatctctgcttcctggagaagcacccccagtatgtttaatttgtaatgaacctcttcaaattgctcacctcttgtttctaccccctcaaatttttgcttcttgaatggtgaggccaattggaactagccgttaggagctattattatattccaaatcccggagtcagtgatcgaggcatcaagccatttactccgtgtcaaagccatgctatatgggctactctccccatcgttcagatgtgaatcctgagactctgagaagttaagcaacttgcctggtatcacatagttaataagtcacagatccaggactcaatcccctgaagctgacaccaagtatgacacaattgatttatcgccacagtaaaattttttgttttcctcacttctcccgcagcacttgatatatagttgctgctgtgataaatgagcaaatgtttggattataaagccgtttgttatgctatatagcccattctacattgggagatggaatgtaaaatgatgtataatacagtcttctataatggagactattaagatagaacagagagggccaggcgtggtggctcatgcctgtaatcccaacactttgggaggccgaggcgggcggatcacgaagtcagaagatcgagaccatcctggctaacatggtgaaaccttgtttctactaaaaatacaaaaaaaaaaattagccaggcgtggtggtgctcgcctgtagtcccagctacttgggaggctgaggcaggagaatggcgtgaacccgggaggcagagcttgcagtgagccgagatcgtgccactgcactctagtctgggcgacagagcaagactccgtctcaaaaaaaaaaaaaaaaaaaaaaaaaagatagaacagagagaatattgacaaaagaataatagtaatagcgatgatagtttacattttgcatatgtgctgtgtgccaggtactggtatacaccttatgtaactctgcatgaaactctatagatgagcttcaggaaagttaagggacaaacttacctcaaacctctaaaaggttagaggttagtaagagccagcatcaaatcttgaaccccaaattaccccaaagttagcatagtggaaaaactatacagacacactggaagcaggctgctgatgtaaactgtttgtattcaatacgctccattttgcaatagataaagtccttctcctgtaatttagatagtttgagttctcactgtggcttcactacccatgagttgggtgatccgaggtaagtaatttttcctttttggttttggttttcttaaaaattccattctggttctgagacttgatgtgcttctaataatttatgcaacaacctgcagtagctagttgacccttcctgtttctcagctacaagcctttgacagctcaggaatttggcgtttgtcaccctctgcctggacacttctttcccacttctcccatgtggcttacccttcaggtctcaacccaaatgccacctcccagagagaacatctctgacctcaagttaacctcctttgctacccccccattacttcccctacagggtttccagaagttgaaattattgcaattattcctttacttgctttttccctactcccaccactgaaacacaagaccatgaggacagggctctggctgtcttttttaacatggtatactcatgcctcagacagtgcttggcacttactaggtgctcagtaaatatttttattgttacccttttcagtcattgtaagtaaaataaatattgttagtattttcagtgattccagagaaaatcagccaaaactttagcgtttcacacatctttataaatttccattttccctggatgctcatttctcaatacctgtaattacctttctacgccaccccattctcaatccttcacacatagtcctgctttccatgcaaggtgggggaaaggcatgtggctggctgattaagcaattagccaggcaagcaattctttcttgagcaagtgagtcattgcagattcagaaactaggcattcacactggaaaccacccaggcaactttgttcttgagtacccttgcctaatgcggtttaatgaaaacctttgcatcacttttaattccctcttaagtaatgcataccatttaatcagggttcccaccctttctattgtgagagctgggggctggtttataaaagaagaagacgagaaatagcagttgactcaagacctactggagggttctgcttgccctgctgaggcgcctttgtttgtggaactgcattgttttgtttctgtggttatatttagagcagtgcacagagaatggaaaggggatgggaaatgaatgagtttacaaatatgttggtgatataattaaaagggcaggaagatgccatgtaaataaatagtaatggggggaagggaagagctgagcgagagaagaccgaggaaattcaggaaatatggggcttcactacgagcaataaggctgcttggctgtgagtgtcatgctgtccccaagcactgccaagggtccaaggcacatttcctagacaacgggacattataatgaaggaatccacctggagttttctctcatcaccacaaggaaagaacttttcaagcatattctaggcaaatccttttctttttttttttttttcaaaaaaaaattcaaaagtaataatagatgttttgataaatgaatagctaccctgattgaaggcttgcattggcacagttaaaagcccttttactcatttaattcacacagcagcactctgaactaagtactattattattcccatctttcaagtgataaaactgaggcagggatgtgaaaccacttgcccaaagttaaacaggtaggaagaagcagagttagccctggaggtcattttgccttgctccagaacccattactttaacaacctcgctctcctgcctctccgcaatttaagtctttttagaattaaccatatgaaattgccaatcttgagtcattttctatttacaaaaagtggcaatttcacgtgattcaacctaatgcaaaattatagaaagtatgaaattcttcctcctgctgtcaaaaaatgtgtatttctagaactttccagtgcacacacctacaatggcactgctagacagacgtccataattttatattgtgttgtttacaagactgggaaaatatgctcaaaaatattccttggacaacaatgcacagatattcttgtgcacatgtgtgactatttctggaggcgggctatctggaagcagaatgctaaatcataaactttccctcagggcatggcagttcttaaaattctgctctccttgcttcagtcattcaaatttccaggtgctaggttcatagagggaatgacaagtcatttgagccaatgaggtacagatgccggatacaaagggggtggacccagaaagacttttgaagaggtaaccccagcaatgatcttccctctgaccagaacatagatatttcaaatttatgaatatgacttcctgcctcaaaaaggtcagagatcaccgtgaagctctggtttgtttcatcaagcccagagagatatgttgaaggggtggtgctgacctcaagggtctttgctgcctggagatgaaaggcctgtgaaggtcaaagacctcggttaagtcaatatcctacacagtgatagctctctgatactctgatcttcaatgactcagctccctggggatcccatgctcctcagactgaagtgatgttggttcttgggtgtttaatgtcgtctgtcttgatctcctagttctcttttacctggctcatgctagtctatctgggattgcagccgactgatcttttgagtacatcgggtgttcatttctgagactcagagctgtactgcctggatttgtgcagctgttgggattccctgttcttggatggagactgtctcgactgtctgtttcctggacaccagcagtaacctgctctctgacgatccattccactccaggcaatttcaacccagcaaaaggatgatggtttctaaaatacatgttagattttaatcactcctctgcttcctcataattctttttttatttttttttgagacaaagtcttgctctgtcacccaggctggagtgtagtggcatgatctcagctcactgcaacctctgcctcctgggttcaagcgattcctctgcctcagcctccctagtagctgggactgcaggtgcgtgtcaccacacccagttcatttttgtatttttagtagacagagggtttcaccatattggccaggctggtctcgaactcttgacctccagtgatcctcccaccttggcctcccaaagtgctgggattacaggcgtgagccaccacacccagcctgtggcttcccataattcttaataaaataccaagtccttcccatgacctatacagtcctaccttatatggccccttctgctccttcctaggccccacctcatactaatttccacaaaatcctgggctccagccctgtgcacctgtccacgccttcagggaaccatgtttatttcttcacacccctccaaagtcattaacttgctgttccttctttaggaaaactctttcccttaatttcccatgggtggtttaatctttccatttctgaaatcctcttttgttgttgttgttgtttacttattattttctgtttccctaataaatattcacccataaaagcagagccttcttttgtgtatttcaccagtgtttagaatgatacttggcacttcttaggagtatactaaatgttcgacgcaaaagtgaatgaagaaatgaatgggtcttgggtttctgttttccaagagccagtggtaattattaagtaaaggatttcctttggctagtcttcagcggacatgcttctttccagagggaggacgagaaagtggataggtttgttaggttaacaaagctatatgtttaaaaacgttcatcatcatttcatattaaagtgaaacaatgtcaatacctttgttaggaaaagcatccaatattgtgtgaaataacacagaatagaaatctgttaccagaataaggttacccataagaactggcacgaatggtgattaagagtgtgcaaataaaaagagttaattccagaacaatgtgtttggcattacaacatttgttatttaaaaaatcataaactaagagattcatgtctgtgttgacattgtaaaagaatttaagggaaaaactggttatccctgaaagatgaataatagaaatgtttttattttccattccacgtgtttatggttgtttaaaagcactgtgtatttctttcattaagcaggtaagacaccaaagggatatataaaaagccagcacaagttcaatctaaaaatgaaaaagtagagaatgactatttctaaagcaagtagaaacaatgattcataaactgggcaatgattaaaaaaacaaacaaaccaggcttaaaggtgtgacaggctgtgatcagacagtccaaatccttcatccaacccctggctctacacaacagcctttgtggcttaactggtgctaaaaaagtgcttcttcaagctgatgttagactgcccttcagaaagaaaactgagcaaaccattttactttatttttatttatttatttattttttgagacggagtctcactctgtcgtccaggctggagtgcagtggcgtgatcttggctcactgcaacctctgcctcctgggttcaagcaattctcctgtctcagcctcccgagtagctgagattacaggcacctgccaccaagccgggctaatttttgtatttttagcagagatggggtttcaccatgttggccaggctggtctcgaactcctgacctcaagtgatcatccaccttggcctcccaaagtgctggggtgagccaccgcacctggcccaaaccaacattttaataatacttttagaagtttctttcattcataggttctcccctctgtgacttattgatactctcgggtctgccttcctccctttgtactggagattcgagtagggccttgtgccagttgcctgtttccaagttgctggtgttattatcactgctcacttctctccttccctgtgggaagctgactcttgtctaatctttcattctcagcctctgaagttgggggcagaaaaggtaaggcatcagagaaacctaaaataggagaggggtcttcaaatgataaaagcatactttggaattgaacctggactgtgggaattgagacatacatgtgggcctgcacttggtgacttcaatcatgtaatgacaaagcaggatggatgaggacgggacttgtcttagtgggtggctggtaagcaatagaaacttactgctcacagttctggaggctgagaagtctgaaatcaaggtgctggtgtattgggtatctggtaagggccccaacttttggttcatccatggcaccttctttccgcatcctccatggtgaaaggggctagctaggtctctgttataaggccgctaatcccatttataagggtttcaccctcatgacttaatcaaatcccaaaagtctccacttcttaataccaacacattggagattaggtttcaacatatgaattttagggaaacataagcattcagaccatagcaggagcccatattcatgtcttactaattcattcaacaaatatttattaaatacaagttataggccagatactaggttatgtgtaggggacacaagcaaagcagataagctcctagctctcttgggctcccagtcaaactgggaggtgaacagtagttaccaaaaaagaaagtatgattgcaagctatgaagaactgtgaaaaaatgagcatgtttaacatgaatgtatgattgaagtctctgacttagttcaggtggacaaaagaaggctttctggaggaagtaacttttgagtagaggtgtgaagtttaaggagcaaacaaggcaaaggcaaaaaaaaaaaaaaaaaaaaaaaaaacagcaagtgtggaggacctgtgagaatagggtgcctttcacccgggaaggattgaaagcaagcccaggtggccgcagcacagagatgcgggccgtgcctagtcagaagagcaagacttataaatattgcagccagcagttagctgccggctgggattgcgggggtctctctggatgccaagtgaatgttagaacagactcattagctctctttttagtccctttttgtctccttgcactcctaaaaaggaagccatctctgatccttgactttcccctaatcttacttcctgaggactcccatttttctcaatcaaacccactagtcctgttgtaataataagaaagaggaccctttctactccccaaaggattgaaagaacaccttaaactgtgtgcagtatccactttccccatatatgatagcccatggctgtgatccacacaaaaatgtttactgagtgtttacaagtgtcaggaatcaagggagatgctgggagtcagtaaatatgtatggtctttgaccacatggagcttgctgtctaccacaatgatttttcaaagagtggtccctggaccagcagcatccgcatgacctgggaacttgttaggaatgcagatccctatgccccactccagaccaactgaatgagaaattctggggtgacgcccagcaatctgtgttttagtaaagcttccacgtaatgcggctgctggtaatgtttgagatctagtggatgtttgctttggtggattttaagttaaccaagtactttcacagacattattttctcccatgttcttatttaattatttagatttcaaaatgtgaaatatttcaaatgtacagaaaataagacaccaatgtgtacccacttttcaaatagtatgaatgctatcactttgtcatgtttccttcaggtattattttagtttttggaaaacaaatggaattttccaggttcaaatgcaattccacctcccatttctttcccatcccattcttccaaagaaatcaccactactacttgtaacacatgatgggttccagttttgcaagtctgacaaaaacaagctacattgacctatccgtgttgtgttttctactcccttctcccactattcaatactaggcaatctttgacagccaggtttaaaatattttgtgattcagaattgagaaaagagtagacaaaggaagctgcaggcctagaggaaatggaggaggactgagagaaagagagagagagaaaagctacgttgattacatattgaaggcctgggaaggaaaggagtctgaagagaaatggaggaaagatgtacagctagtgatgattacagtcaggggatttgttaaatggggaactttgaggtaagagaattgtaaagaagagaaataggttttgggaacgttgtcctggtttgtatcttgaatattgcttcatgtgttttgagagacctgcaaaaagactggatttttttcttttttgaggtgtagtctcactctgtcacccaggctggagttcagtggtgtgatctcagctcactgcagcctctgcctcctgcgttcaagtgattctctcacctcagcctcccaagcagctgggattacaggcatgtgccaccatgtccactaatttttgtatttttagtaaagatagggtttcaccatgttgaccaggctgctcttgaactcctgacctcaggtgatctgtccgccttggcctcccaaaatgttgggattattggcgtgagccaccacacccaaccaacacttggattttaaaaatcactacttcatggctagcttgggtttctttgaatgaacttctgtgaaggtactcagcctcccaagtagctgggattacaggtgcctgccaccatgcccagctaatttttgtattttttttttttagtagagatagggtttcaccatattggccaggatggtctcgaggctcaagatttattagggttacactagatatgccactggcagagaggtacttaaagaatacaaggtttggccaggtatggtggctcatacctgtaatcccagcactttgggaggctgaggcgggtgtatcacaaggtcaggagatcaagaccatcctggccaacatggtgaaaccccatctctactaaaaatacaaaaatcagctggacatggtggcacacacctatagtcccagctactcaggaagttgaggcaggagaatcgcttgaacctgggaggcaaagatagcaatgagctgagatcttgccactgtactccagcctggtgacagagtgagactctgtctcaaaaaaaaaaagaatacaagattctcaagtgtggcccctggaccagtgttagggccttactgtttaagccagaattggcaaactgtggcctacaggccaattctgggcacactcattcatcgttgtattgcctttggctgctttcagcctataatggccatgttgagtagctgtgatggagaccctatggcccataaagcctaaaagacttactgtcttgtcttttacagacaagtttgctgatggctgacttaaattttaagccaatggtgcattttttctctctataagaactggttcagagagagatccatgaatcaaatcaggctagtaaaaggcaacgaaactcggccgagcatggtggctcatacctgtaatcacagcactttgggaggccaaggtgggcagatcacaaggtcaggtgatcgagaccatcctggccaacatggtgaaaccctatctctacttaaaaaaaaaaaatacaaaaattagctgggcatggtggcgggcaactgtaatcccagctactcaggaggctgaggcaggagagtcgcttgaaccagggaggtggaggttgcagtgagccgagatcgcgccactgcactccagcctggtgacagagtgagaccctgtcaaaaaaaaaaaaaaaaaaaaaaaaaaggcaacaaaattcaaaccagggatttttgtttattttgataatttttcttgaagtagacttttcacccttgctggatggaaataagaaagcctaaagctccagaacccatggacacatctgacatcactgtgagggaaggtctacctaagacaggagagatgtaaaggagacagagctgataaattcagagaaagagactggcgctctggaccaggcttgtcctgaggcccctggagctttcgttacatgaggaatatatagttgtcccttggtatctattgggaatcagttttaggaaacttctctcccctccatggatagcaaaatccataaacactcaagtccctgatataaaatggcacatggtatttccataagtcctatgcacatctccccatatcctagtttaaaccatctctagatggtttataatacctaatacaatgtaaatgctatgtaaatagttgttatgctattgacttgcattattttttattactgtattgttctttttttcaaatgttttcaaaccatagttggttgaattcagggatgcggggccttcagatacagagggccgattgtattccttttgctagttattgttcatatcttttaggctggtgtttctgttactggcaacctggaatttcccatctaattcagagtctattatcttctttattcatttgacctgagtgccttctataaagatttgttaatcaagaagcattttttgaccactgaagtctactcacaactgtatggattagttcaggaaagtgagaacacccgctgaagggtgaacaccaaccaaataaaaccaaaaattgaaagaaaggaaaaaaaagactaaaggagaaaagaaatgagattacttacccaagggtcattttgagatacttgttctctagggatgaacattctgcaatagagatatcagcaaacatacagacagtcagatatgaaatgataaatacaaataattttacaaggactataaagctcattattggcaacaggtattctggggggagtgtctcagctgtatggttgctattcaccagacagcaaaagctggaatgaaaaaataaaagcgaggggagggagagcatgaggacaaatacctaatgcatgcggggcttaaaacctagatgacgggttgataggtgcagcaaaccaccatggcacatgtatacctatgtaacaaacctacaggttctgcacttgtatcccagaacttaaagtaaaatttaaaaaaaatttaaaaaacacaaagtaaaagacccagacttttagttcctgactatgccagtaactcataagtcattttcccatttgttgatgccattcatcactccaatattatttattgagcatctactacaaatgataagcactgttctaagtactggcctcaatttctccatctgtaaaattagaggatgagatcggatgattcctgcagtgccttccctcgcttgccttttcaagagaatttatcctccccatgtttcagttcaaacccctgctcgaccatttcctggctgtgagatattgggcaagccatttaatctctctgcatattcatttctatttctgggaaataggaataatgacagtatctctctcaatggattgttgtgatatttaaatggattaatacatgcatctaccgcagttcccagcacatagtgagtgctatataaatgttagtgccattattatgatgatcatctgtattattatttaataataatttcagaaactgaagagttgggtttgaaaatgggactccccccaaatactaaaatatccacatattgcttcacttagttagaactgttctcaccctgctgagcctctctttggacatatagccaaagcaatttttttaaaataccacaatggtgtcaaactgtttgggtggtttttccagatgggcatttatatataccccgtttatcatggacatgatacctgtgactccttcagttcataataagcacagaaccagctgccatttattcgggtgctcactgtgtacctggcactgtgctaaaaataagcagtgtgttactcttcattgcaaccccgttgggtagaaataattactagactcgtgttactgagaaggaaactgggggtcagggaggcccagtccacagccaagaagtggcaagcgggtctgagtttaggtgtgactccaaagcccacactgctgcacctgactctatactaccttttaattcaaagtaccaagatgaataaaattttaaatatcccctgctctaaatgtcctttcctgtaatttcggctcaattaaccaaataaattacatatgaagagtcaatcttcttggacacagttattccactttattaaaacaatacataatatatgtatgtatgtatacactatatttaggggtacaaataagtgcccctaacgttcttaaatattcataaaatttttatttaggagtgtgttttattcatttaagcattaatgtatatagatcgttaactatttaacagaaagattggcattggtaaccactgttaattgatgatcaatcataaagagacaaagcaactttgataatacagtaaaactcaatagaaagttggtttgatttgctaaaatgtgattgacttacagcctttcagtatatacattgcatagggtaagcttcacctagaatagatcaaatttaacccaagtttgcttccatttgatttgattgagtgaaacaagactttataatagcattccttcttccactcactcagtaaatcttgcattccatgttggggaaagatttttccaggagtatctacattagtcaaagaatgcaccttcttggaagcctgtctaccttcattaaatggctttcagagctcacaatgcaactgaataacgtgcattattcaaatggttttcaatgcacatgaggaaaaggaggtgtgctcagatgggagtgattttaagcagctcatctgcaccacaggaaattcatttatcctttgattcttatgccatttcgctggaggcatatgtatttctagtacctatatagttttgtggggggctttgtagccacctaaaccagtctggtgaatagtcatcacgcttttgaaaacacaaccaaatgccttgtaattttcttaggaacaatactttttatgcttctccattctggctcaaaggtacagtgagatgtttttactaaatgggcttattttctcccacatggagttttagaccctgtgacaaatgtaatgaaatctgtcagtcttttccacctagacacagaaaactaggtgcagtgttctgtctttgccaatatgaggtgaaaaggatgggggtgaggggtgcttttaagacggcttgcaactttggagcttggatcgaagacatatgcagtctccaaagagatagatggagcacatgcaggagagagtaagcatttgcaaaaagagcccccagaatccttcttgacaagcattttgcatgcagttaaatagacaaatgtattctgctgccaggattttgcaggaatcatatttgatgtctgtcaccaaaaagattcttgggcactggtggagtgacaaaccgttactccttagagcagtgactctcaaacttgagcatgcatcagaattacctggagggcttgttaaaacacagattgctgggccccttccgcagagtttctgactcagtaggtctggggtggggcccacgtgatgctgatgccactagactggggacctttaagaaccactaccttagagtgatcaaagagggtaagcttgaagatcctccacccataaaagtctactatctgaggactgtcaggacctgtgctttcgtgattacaatttatgctaagataccaaaacccgtgaagcaacatgagaccccccagaagaaattttcttagtgagaagttggtttaatttttttctttcatatctctaccactcatagcttcctagacatgtctaatcagcattgccctttccacctcttgtttgtgaaactatactttctgaaactcctgtcttgctttccatctgatagaaaagccagcagctcacagaatgcattacacaagctaatgctttaggctagatgttccagaggtgattcaagtcgatgaacaaagcctccatttatgatacctatgtacattctcaaccgatatgttcttggtgatggcaactattaacattttctcagcatttcagggatttacatttgacccccaaagtgagccagctctgggctccacggacccataacgtgcattgagtaccattgctaataaacatttacaacgtggtgtgcacaggccccgctccatgaggcctatttgtgagaacatagcgagtgatctgtatttaggccagcatctcacaccacattaaagagattggtttgttcttattacattgctttgtcacttgcatttgcatctccaacattccccacaccccagcacaatagtttggaatgctgaggtatccacaactttccccaatccttgggagcaatatttggaaaggagagtggcgagggctgcttttgcaacaacgtcagggcagcaagagttcattgtttctttccatccagccacacaacagccttcctgtttctgcacctagaaacagctattcggatagaagatgcaggttcagtcctgttgacatctgagtgggcagagaactatcctttgaaatcttggccctttcctatctaccttgccaagagttggcattgcttggtttaaattttggtcgttgcatttcatggtgcagaaacccctttacatatgtagaaagggtgtgtttataaatctacacccactgtgcatttgtctatttttatatatgcatattgcatagtaatagagattttatgcattgaataaaactatttcccccaatttcactcggtttatcgttctgctgaataattcagctactatatggacttcatggacttttgcttgataaattcactattcagagcttttccatccattggaatttttaatcaggttgaagcccatcatgttgagatcaaagctgggaataatgatgttaccaatctatgttttagccaaaggatgttccttagagcgcacgtcctcaaatcgcttagtcgctagctgaagtgtaagagaatttatgatgctaaataaaaccaggaggaaaaaaaagatgttttaataagatggaaatccaaatgttaaaataatgagccatctgcatgggtggccctctcttgagagagatgccaagagctttgccatctgtgaaacatttaccagctgtttccttccttttttgtgaacataagaaatccttgcagttggtgtttctaagtgatacatcatagagaagaaaacaggtttgcccaacttcaggaagactggacagagctgaattaaccaaataataattttggcaactgcagaggtgtacaccagtgtgccactcttcttcccgcagatcccttttctgaacctcaatagagggcacggaagatgaaaagggatcgggaaatgaatcacatcccacgaggtcatttaaaactgaatgtttgcagagaaagtctgtgcctgctcactcgactgcctgcaagctggttttaccttctgagtattcaagcaaggtttggactaaattgtaatccaactgaaatggggaaaggtgtctaaagcagtccaaatatttttgaacatgtctttcctttttctttctcttctctgatcactgtttcacatatctgccagtcagccctgtattcctgctgcttttgccctgacaggcaccttatcttggttgcctgagttctgtatggtcttaggatctgagcagagtgccatgcatgaatttaactttgccgccggctctgatccgaggcaatgtgcccagcgataaaatcctcacagtgtggggtgctgatctatcgatgcctccccaggttcctgcttttttttttttaacctccctgttctatcgccagaatctgacagaattttattttttcttcgactgccatcttttctacttcattaactgtcaaatgcatttcagggaacataacctaacaagaaggtttagctaatgaatgtgaagtctttcaggtgttcccctcaggtgtcattcctgaggagtttaggaaagctttaggtcatttttcaaaaaataatttttctaaggccatatgcagtgaaacaggggggatatgaatctttggactgcggctgctctcgctccagcgcctcagtgttaagccaaaccttagggggaaagaaaatcaagactcatggcttcctcctggaaaacccaagagtcctaacagcagaattgctggcattctttaacgggtgatttcacatatccgatcagagggatgtgcactgtgagaatcgcatttcatgtaaagtaagggcataaaggaatttttctaggtcattcagcaaagcaaagttaacctcactttccaagccagaggaaatttccagatgcttcattcccttactcactcaaccactatctgagagcctgctggactctaggcactgtgtccacttctgaggtggagctgggagcaaagctgcaggttccctacatgcagagagcttacaggtcacggtggagccaatgaaacacgacttacaatcaagggtgaggctactaagtcagtggttttcagccagaagtaattttcccaccaccatcaccaccactaggggacatttggcaatgtctggaaatgctttttagctgtcacaactgggaggagaagtgctactggcatctagcgggtagaggctggggatgcttctaaacatccaatgcacaggacaacccccacaacaagataatgagagttatgtggctcagtaagtcaatagtaccacaactgtgaaactctgtccaaagagaatacctggaggagagatgggggtgaacaggtgaaagggtcagcatgtcgtgtgcctcgccaagaacctagacaccaaggagaagaatcaagaaaagcagggatttatggggctcttgagctaccagcctttgtctgttgtgttctaaggccaccttgaagggcttaacccttacaccgtggctgtcgcctttatcttttaatgacgtgacatagttacaagatacagcaggacacaggggtgaaaggaatgaagagagactggaagagacagggatcagtagatgtaaaggctgggaggagagctgtggtacagttaagagactctgaatttccaaaacagccatcagatttctggcttggaggagtaggtggttggaggacaaacatccagagaaggggttttcattttcaactgccctctccatgttacacctttatcaaaagatgtgaccagcacttgttctttacaagcagtaccttcacaatcatcagcagtgtgtctgattcacattttctgacaacccacgtgatagatttaattatgcccgttttccagttgaggccatggaagacagcatggccctatctacaaaactgctacaaccacctgagcaaaagatagattaacgagatttaaatgccagcctgcttttccaggcaggtaaatctagatgcctatttgtataaattcaagtaggttacatataggttatctacttagatataattatattcttcacatagtacgtatagttgagtgtgcagttttattttattatgtttcctaattgaaacgagcagcagcacagagcatctaaagttatttttaaaccaaaacttgcttatcttaggcttgggagtactttctatggtattgccactcacctctcccaggaaatatacctttctaattatgtttgggttacttagcattttttaatgctatggcacacaatgttacagcaggacacatcagtgcttataaatatgacaggagtaattgacagaaaaaataagagttacactctagacattcacaatctcttctatattttcccatcttttcccttacaccgggagccagcaggtatttctgccagaatacgcagaaagaagggaataaactttagagacaggcagatgggcttacatcgtggcagtcttattggctaggcagtatttggcaagctatgtaacctctctgagctgcagcttccacctacaaactcgaggtagcaatatctttcttgtaaggggtgtgtgtgtgtgtgtgtgtgtgtgtgaaaagttttgtgaatatgttattaagcatataaaacactgagcccagtgcctggcatatgtagaattactattcaaaaatgtcaactctttttgtatattatcaagcctcgtgaaaacaggctggggtatgggatgcagagaactaacgccattcaagcttagcttaatgaagagagataatctttattcttgtgataacgtatgtaaacattttaattccacttttcataggtaactgaaaagatagggtggtgcagttaaaaaaaatagtgaggagagaattggtgtacaatgtgatttcaaatcccgggtcaccaacttggtatttgtgtcagaatgggcaacatctatctgagtgccagttttgttcctacacaatgacttatataattattaccctacaggtttgtggagaggatgcagtggacaagatatgcattgtcctttaccgggggaagattatacacaccaatcaggcttgcttcatgtgacttgcctcagccaatcaaacatgagcaaaaaatgacaattgtcacttgggcaacatcgtttaagagctgactcttttttccctttgtttctccatcagcatgggtgcccgagtgaagggaacatggagcagggctgcaggtgatctatgacagatcttacagcaggagcaggagcttgacctttgtcgtagccaccaagacggtggcatcatcccttgctgcctcataaactggcctttcaaacacagagagtgtagcgccttgagcacaactgccagcacgggcctataaaataacaacccccttcgccttcactgcctcaaagaaggggaaaaaaagaaaaacatttccagcgttctgttgctttctgaccttgtgctttctttatttgaataatatttacagtattttgcctcttgcttcctctgccccgaggtcttcatggactcacagtccaggtgctgaggcaatgggactgcttcccccacacttcggtctccctgaccgaagccttaggcttcagagggctcctcccctgggagtgcgaagagcatccattccacacccaagtcccctcagatgcttcagtctgtgcgcatcgggaaagcagtttggagtcatggacacccttggcgcttgcaaacttctgcggaatctgattcaatcatgcctttcctcccaacaagaacaagacgttctttatgctacagatgcaagaagcaaagactagggcagctacataaaactcgcttggcttttccatctgaaatcccaatgccagagtcatgtctgggagggagagaagactgtccgcacttgatgttatagcttacctcacttttgcccctttgttcattctcacaaggtcaaaaatgacaatttcctcccaaagatattttacctaaaaaaaaaatgaggagaggtaacccacttataaaaaccctgatagatttttgcatttaagcaacgaatatagtaagtactgttgaaatgtgcatcacatccagatgggaaaatatctttctgtaaacgcactgcttacctggacttctctgtctcaagtactcaattctgccttggagcatacaagcagccatggacaatatgtaaacaaataggcatggttgtgtttcaataaaactttatttataaaaacaggttgtaggccagatttgtttgctgattcctggtcttttagacccctgttggcaggtatagtttgctgaactctggtatattaggtctacccagaaagaggtaaatatttctgaatgattcttttttttttctttttctttttttttttttttttgagacggagtctcgctctgtcgtccaggttggagtgcagtggcgccatctctgctcactggaagctccacctccggggttcacgccattctcctgcctcagcctcctgagtagctgtgattgcagccactcactagcacgcccggctaatttttctatttttagtagagacggggtttcaccgtgtaagccaggatagtctcgatctcctgacctcgtgatctgctcacctgggcccctcaaagtgctgggattacaggcgtgagccaccgcgcccggcctctgaatgattctttaattcaagtcttcataaaaacaacataaagaattaatcaagagtaaagtcaaaattatatagaaatatctaaactctttcacttagaggttactatatttaatatatgcatgtatatttatatcaaactaaaaagtattacataatctgtgataagaacctgtagttcctcataaagaaatggtaaaacccttggagagctgttatatcatgtgtaagttaggatattgcctaagatgctgtttaaaaaaaaattatagtggttttacatgatagaagtgtatttctctctctctccaaccatactcaacacatggtgtctatctctggcttgtccaagagggtggtgtcaatcatctccagctgtaaccattaggaattgggaaagaggcacgggaagtcacacccagctcttctggggagcatcgcacgccacttctgctcatatctcattaaccataatttactcacatggccacaacccagctatgagggaagttgggaaatgtagtctcaagctgggcaaccatctgctccactaaaatatgagtgttacattgttgtaataaaagacataagagagaggagaaaacactagcagtcttttgcatacatcataatggaaaagactttaaactatggagtcagactgatcaattttggctccactccttaccagttatgtattattaaggaccatttagcctttttgaacctcaggttcctcattggtaaaatgagaatgataataacaacctctcagttcctcattttataagtctccctatatcccaatcatcctcactagggagagaaatctgaacagtcaaatccacccatggttccaaatccaggctaagttatccaagggcaccgagtgttcaacactgcccatttctcagttctgattagtgatatcaaaagagaatgggccacaccatgattttattactgacactgacttaaatcaaggtcagtgaggaaaacaactgttctgttatgggaagctttcttgagcacacaggctccaagtttttgtcagtaaagttattttctttgtgagattattcctttttctcttgcacaaaaccttgccaaacactggtgtacctttgtccactgaggaaataactagcccacgtgtgactctctctcttcttattgttttcttcatttgtatatgtctttttttcttcttagtattattgtaatgtcattaacacagggaaagagccctgtgtcaatggccatggaaacagagcaacggagcacagctttaattgaactacagcctcctttccatcacaccttttgcttggcccaaaccattttgtaatcactggagtataaatattgtagtttttgtcccttgttttgtctttctctccataaggtctgagtgacctcacacattccacttttccagataagacctaataccttccccttctccaaaacaatagattttctcctctgatacctctcattcaacatctacatttgcaaactgttgcaaggatttaatgaggtgatacatgcaaagttcttagaaccaatcataatgcacagtaaatgctaaattaaaagttggctcctccacaaacaacatagagttggttctgagtttagcttccaatccctccccactaagaaatgggtcaagccattatccaaatgtatctaatggaattatctatgttctttggcttaaattcttcattattcattcttccatgccagagcagtcttcactgaaacatcaaaaggctgcttactaatatcagggaattccctgactgcaattgcccaaaggacacgccctaaactaaagtctagaacagctgtggagctaaagaagtaggcatcccatgccatgctctgcaaattgccttccagtaattctttattgtacaggaatggcttctgtctctttatgttagccattccatcatggtttcctctccctgaacattttctctctctgctcaattgcatcttctaaggcggccaaatggagttttgaagccagctccttttagtgtatggaaatttccagattgagattgtttcccattgggcaataccacaagcatgactcatctgatgatgtactcaatgtgttccctgtctctgtagaactctggagtcttataatttaacattatatgcattataggataaatggtacattataatatgatgaaaattgatattaaaaggcagaaatcattgctgtcaatttttagcttcttcaccataatttctcaactaatgttagagactcattttttacctccccactaggagtctctagtttaaccagattcatgtgggtattttttctcttttgttgtcattcatttattcattcatttttctacacactggtgtttgtttgtttgtttgtttgtttaccactgggtcttgctctcttgcccaggctggagtgcagtggtataatcatggatcactgcagactcaacctcctgggctaaagctattctcccatctcagcctcctgaggtagttgggactagaggcatatgccacaacacccagctaatttatttatttttttttggtagagacggggtcttcctatgtttcccaggctagtctcaaactcctgggctcaagaaatcctcctgcctcagccttccaaagtgctaagattacaggagtgaactaccacacctggcatagttgcacatttttaattaatgcttatcttttgctagtcactgtgctatttttacaaagataaaataatggggaagataaacaagatcttttctttattaagcctcaaatttgttctcaacgtactagactttttctgcttctctgtaccagtgattctatccagaacagctgctcccttgttctttgcctatgcaaagagtatttaaagtctttattctccatggaagcttcccaaattattgcagcccagagtgaagagagaacctttcttatcgcacacacattttctaaatcaattaaaaatttgaggagttataggttatgtacaacaaaaaatgattctgaatgtcttaaattatacatacatatattatatatgtacatatattcattcattgttcttatatataagaatttaattatatatctcatataaaattatgtatatatctatacacacacgcacacatatatgtacagttggcccttgaacaatgcagaggttaggggcatcaactaccccaacagagtcgaaaatccacatataatttttgactcccccccaaacttaactactaatagcctactgttgactggaagccttactgatagcataaaccgttgattgagacatatttcttatgttatatgtattatatactgtattcttacaataaagtaaattagagaaaagaaaacattatgaataaaaacataaggaagagaaaatatatttactattcattaagcggaagtagatcatcataaagttctttatcctcatagtcttcagatggactaggctgaggaggagaaggaagagggaaggttggtcttgctgtctcaggagtgggaaagatggaaaaacatctgtgtataaatggaccccctaattcaaacttgtgttgttcaacagtcagttgcatatatttgaagtatatgagggattccccaaattaatgagcaattggagaaccaggttagaaccatggcaattcaagagtagacaggagacaaggatcacaacattctccttttagcaggaacaatcaatcacccagttattttgggtgcaaaataataccacagtcctgtatgctgctgatgccactgctcctggacactggggaaactactgtgagtgagttcaaatgttctcacagctatagattcaaaagtccagagcaggcacatccaactagccaagttttgatttcgtggctgccagagggatggtaaagtccagtctttcaactttttacagtggaaggtaaaggcacaatctctcacttactctacatgcaatgagagtttctctaacactggaaagagaaatacaaatgacaaagaaatgacaaggtctttgtcagagaaacagagccaacagggtagatagatgacagatgatagatagatagatagatagatagatagatagatagatagatagatagagatttattatgagaaattggctcgcgtgactatggaggctaggaaataaagcaaccttctgtctgcaagctagaggcccaggaaagctgatggtttcattcccgttcaagcctgaggcctaaaaaccaggagagccaatgatgtaagtcctagtccaaaggcttgagaaccaggaacaccaatgtccaagggtagaagatggatgtccctgcccaagcagagagagcaaattcacccttcttcttcctttattctgctcaggctcttgacagattggctgatgcccacctgcactggtaagagtgatctttactcagtctaatgattctaatgttaatctcctccagagatatcctcacaggtatatatggaaataatgttttaccagctatctggacatccctcagcccagtcaagttgacatgtaaaattaaccatcatcgttccctctaccaatcatgactatattgtgatccttttagaaaattattatcattgccttttttaacctttgcactgtttattctctaaacagacacagagtttgttgccagctatctccccaaccaagtctcttcaggccaagaacaggtattataaaatactttgtgcatgacttcatggtgactcactcacagtaggtacttatgaagtaatttatagcctaataaatgctgggaattaatcctgttggccccttttccagcatttagtgcgacctataatgaagaatttgagtctttggaacaaatttcaagtcatttcataattattcaaaattatgtctatttaacaacatatcctgtgtttacttttaagcagtggaagagtgcttataatagaaacaatagaacaattcagtattaaatatatctttacatgtgctgtttagccacttgaggggaaacaattttctaacaagtggcaatggtcaagaaagctatgaaatttaggccagttgtcacagaaaataacttattagttgctaagctaccagtcctaaaaggaactcaattagaggagacaaacagccttaactagacctactttattggagagtagaacgttgtagctgtcaggtgattctggtggatgtgtggcaggcaaagtgattgacaaactggtcttcgcttggcatgaaatttggctttgaattagtgagtgactgacaggcgggtgtcatctgaaaatgtggattgtgtcttggaggggctattttgcaacaaagtgattgacacattacagagattgtcccatagatggagaaaaccaaatagagatttgttttgacaagcatttcctttttacctgttcattttgtatacagagaagagagagaagggaagccctcataagtgctaattgatttctccagtgaatatcggaatgatggtggccatggaatgcacagaaagagacctggacagagaggagtcaaaagacaggtgttaaagttgaatcttatatatattaaaattttaacaaataaccccgttttttacagaggctgtcacattaatagaatataagtctagaggtgttggcagccatctttgccacctcatgtgaatagggttgccagatcaaatacaggatggcccattaagatgaatttcaaataaagaatgaataattttattatgtgtcccaaatattgcatgggatatactgaaacttaaaaaaaatcattgtttatctaaattcaaatgtatctgggcatcttgtatttttattagctaaatctggcaactgtatgtgcaataaacctgcttaggcatgaagcccatacatggaaaactggagacaagaggtggcaagagacagattcctggtgttgtcctttgcacacctggatccagctatgcccaaagcttactctaatcatgctcctctcagattcaagcagcacacacacacacgcacgcacacgtgcacacacacacacaacactgttttactaaactcgcttgagttactgagtttagttgctccctggcaaccagagaactccttctacttcacactttttctcttcattttagttaccgggttatattctaattggaggcagcattattttatccaatacaaggtaagctattttctggaaatgtgtctgactgccatcaaaatggtcatttgtcttcttgaattacaaacagtttttctggtgattccaaactttcttcatccttctccaactttattgacctccactgctatttttctgaaagctaacagttaatactttcctttcaagccacccattttaaaaagtaatttaaaagaattatttagaaatttttaattatttttaaattatttaaatcttagatatttataaaatcttatagagaaattagaagctgaggaacaacttggaaattttattgtcacttgttgctaaaaatattgaataaatagctctgcccatttcttgtcttttttaaatgtagttgaccaaccatctttctggccaataaaatgtttatgtgttacttgtaagctaccttgtctcacaaagtatttgagcgtgctctgaacaagaaaaaaataaaaagtgggttgtcttattaatctgtgctttttggatgtaagcaacagaaaccaacttacttgactgatataaaatgctgttatgttttataaaggtaggaatgtctcaaggaacacaaaagactgggatacagccagcctttaggaagagactggactcaaaaactagaaaaccactgaggcactttctctccctccctcacctcccttttcatttctactctactttctttactctagactttgatcacactatagacagatttcctccgtgcttagtctgtttggtggaatatggtgaaatatggtgaccccagatttacatgagtcaggttcagtgacacaaactatcagtcccagtcctcaggagacagaatgtgatttatgcaagtgttcttgctcaatccacttgaggaagtgagcaaggtcacatgatacaaacatggctaccaaggatccatccctgtggattgcagcccattttcagagttaagagaacatataactcctagagttatgtaagttgccagtgtgatagttattaagcaatgacttctcagctctcaatccctcttctatactctgttctgtgaatctggaggctgggatgctacaaattccatagctcttggataggtaggcataaaaggttgtctaaaacagaattttagctaatgccatcctgtccaagcttggctgtgagagcaaggttggtggtccagatacctacactaagaatggtctatggtcccttgaaatggtatttgaagtacctggactacaacactgtacctgggctatgattccaagtgtctgtctactggctaatatggatcaatggaatatgagtaggaaatatgtaaaaaaaaatcaaataaatctataaatatgaatttttaaaataatctcaaagtgtctctaatgtgtgtatatttaaagaattttatttcagaaaactcactctgttgagttcattttgaagagtctaaaggaagtggatggacagctgtgtttgtaacttcaagtgcattagaggttaaggcaaggtagagagtgatgaaggctaaagccccctggagaagaatctccagggacagaagcctaggttcaaatcctgtcagtgccactccctagccctgtgacattgaacaagtaacataaccttgtgtatctatatcctcatcagcaaagttgagctaatgagtgtacctgacacatatggttgtgaaggttggatgagatggttcattcaagatggtgagctagctatcttggcctggctaactctttgggtctggactaaaataagtactcaataaacgtccacattatcctacttattcttacttatcttttgggtcttgaggtctcttgaattttatttcaggggctatggggaggcagtatgaggaattaagccatctatgctaaactccatgtgtgtactgaatgactatgacctagagaaaggagagaaaatgatgtgggcaccataagcacagaattcaacaaactatgatgactttggccgtaagtgctgctttatagctctctataaagctgcccatcaacaagctccagtcagatgacctgcagtaatgagagtatgaagagagcagcatagcagaacattccacctgatggagacgcagatcacaagaagggcattcccataaagcacagggtgcctttcaatctttttctcctccttctcatcccttacccttgcccctcaatttgtggtatcactctcagtttctagctcccattcattcattcattttttcaatgaatcacgttttaatttactcatatattcattcaactgtctgctcatcatttttaaaattattcatatagaaaatatttattgagctaattactgcagcttgaatttattgggctctttgtatatgatgagttcttagatatgtatgataacaataagataaacagcatcaacatttattgagcagttactctgtgtccagtgctgtgatgagtgttgtacatgcattataatattttgtcttcacaaaagtcatctgagataagatgctgttattacagtatttttctaggttgggagaagtatcttagagaatttaggtaaactgttcaaagtcacttagttagtaaatagggagcccaggcttcaaaatcatgtgtttctaacctaacacacatgttcttaaccacatggggcaggctcagcagatctaaaactagagtctttataatcttatctaataatgaattcatagggaaggtggtacttaaactgtgttataaattatgaaacaggggactagtaataaaatgacttaatgaggtattcattccaattgaaaacaatatagtaaacaaaacaacaaagcagaaacccacagaatggcccaattttcctggcataactcatcaaaaaagtattattaataatatatccatttgccaaagccaaatgatgagttacaaatctttcctttgaaagggataggaaatccaactcaagaaagcttgaagaataagaggacatatggacttctatcactataaaggtgaagggcaggaccagcttcaggtacagcttgatctggtgacatcaggacgagctttgttcccttccatttttttctgtctattttccacagagtcagcctattcttcaggcctcagataggttcccattgccaattccaaagtcttccatttggtagcaaagaagccattcaagtcttcataggttcacaccacacagaccacagaaggaatggctctcctcctatggctgtcaaggaggagcaagttccctctctttccccaagaagctttaacaaacttttctacagatttcgttgcttctaagtttctgcccatcatggatcaaattatggttgccagaagggtgagatgagatgagattattgactttagccagtcctgagagctggggaaagggtcaataccacaagaatggctgagcacgggacagaattaactgccccaaagcaaactccacgtggtattctcttacaggggaagatgaatagaagttaggcagcaaaggacacttgagtccactgcaccaaacaattctggattttttgcttaattattgagtggctaaacatatcttcctgaagcatataacagctcaatttagcactctactaaactggaaattttaccttattcattaccacatggaagcattttataaaccaaatgcaacaacgtttcttcacaggcatgagtatatgtttcattttttttcccatcaaagtgcttcagaagtcccaactttcataatgtctcaagtggaattattgtcattattttcctttatatcagcttcatatcttgcacaaatgaaggtatcaacatgcaccatttcaattaaagtcagattaaatactgtgtttctttacagggatggtatttcaattgcaattctttctgggttgtttatttgacaaatgtgtttggcatgtgtaaactgctgtgatctacttttctttttgtgacattttgggcataggaaaaactgcatggcttagtggatgacacagtttgctacaagtggcaatataaaaattggaaattcttgaacgatttaacatttccccttctagttacattctctatcacagaggagtgatattctgggggactggaaccaatcagaggataggagtataatttttacaaaacaaatgtatgtataaattatcactctcttctctcttctccacagatagagatactaatagatccagagcgtgagatgctgataggggtgtcatcttctacaacaattcatcttgtcagtgaaaggaagaattaagcaacctgaaccattaagatacacagttagacttcagcattatccagcacatctcgactacactggtggaaggaatgtgtgtttcttgtgtagaagagagagctggtgtgtgcatgcatgcatgtatgtgtgtgtgtgcgtgcatgcgtgtgtgtgtgtgtgaaagagagagaaagacagagagacagagagggagagagagaaaaatagatggggcagggcatatgatctcaagtcggcctcagtcttcacccttccctcttgcctcggatccaatgcattccatttgtggttaccttcttagtctcaacatggacttgagttcctgggcttttatctaaccagagccacctagactaatagtctggtgactcttcaatccaatacccttcaagcatttgtcccacataccattagtgttttagtccattctcacactgctaataaagacatacccaagactgggtaatttataaaggaaagagacttaattgattcattgttcaacatggctctggaggcctcaggaaacttacaatcatggcggaaggggcagctaattcttcatatggcggcagcaagaagtgctgagcaaaaaggggaaaagccctttataaaaccatcagatctgtgaaaacttactcactatcatgagaacagcagcatgggggtaagtgcccccataatttagttacttcccaccgggtccctcccatgacacttggggattatgggaactataattcaagatgagatttgggtggggacacagccaaaccatatcagctactgagggtggaatatgattttctttaaattttttttcagaatcagaattacaattttacttccattggttgaaaatgagtcaatattctttttttaaaaagtaaattaaaatatttccaacatttctgcagtttgtgtttctctttggaattcttttgttagtttttctgaaccaagcagcttcttgggagttatattaaaaggtttaatattcacaatataaatcacatcctttgtaggttacagcacaccactcattacatggttctggtatttctgctgaccacaactgccatctttgagccgattgtaaatgcagtgtatgttagttacaaaatcttagcagaagcatttcagggctaataaatgtgatgtttttgtatctttgcctggttcatattacagtggtatatgttttcattagagaagaaccaacatagatttctcaactccttccattagtgttcctaagctcattagagattggtaccctgggtagctgcccagccaacccacttctcaatccacatctgtgggagaaggcgaaggcatgaaagaggaatcactgactcacagaatgtgtgagcttaaagacctgacactgggaaatttgcaaagcaaaatttttaaagtatttccatattttattaagtattacaagctaaacttgattgtctgtttttattgcatactcagttgcatgtaattaattcgggagtcagcaaactatggtttatggcccaatccagccagaagcctattttgttaataaagttttattggaatacagtcatgttgattaatttacatattgcttatggcttctttcatactacaccagcagagttgagtagttgcaacagaggccagtatggcctgcaatggcaaaatatttactacgtggtcctttaagaaaaattctgtctatctctgatctaattctctaaagtagtagaaaaatttattactttttaaatataatttatttgaatgtttagatgcccatgatataagctcctgtacttcctcttcaggacactcgcgacatttgcaattctctattcactggacatcttcagattataagttgcttggggacttctactgaatctaactgtatcaatcaagaatgcttttgacagcaagtaacaaaatacttttaactgagccttaaaaaatgaagacttgccatatctcaccttataaaaagcctggatgaataagtctagattcaacacagaaggccaaggattgtgcaaaccatcatggccccaggctttgattgtccctcctgctcctcagtgctcatgctaattctttgtcttcatgcatgtccacctcatggttgcaaattttttgttccagctccaggcatcacatcctcataccaacatatcaagcagagaagaaggggcatgaacaggaaacttttttcttctaaagctctgatattttaacctaggaagaaaaccaccagcagacttcccattatatttcatttagcagaacggatcacattacttccaacctttttcactgctgtaatcacagagctagaactaaactggaaggtagtggacaatccataacagtgtgttgagtggtacatggaagaatggatgaattatagacaaaaatctttcaagtttagtttaattaggtttccacaatgagcaacgaaggaaggcaagagaggagatccttgatagcaaaattattggggaacatcactttatcttaacgtttttattttacacataaggaaagtaagaccccaaagtcggaagtgaggtattatagtgaatttttatgatttctgattttccagcatccatgaaccacctttctggtagcatctctttaatctgaacaacccactttctccaacgatgtaattcaaatgaagcaggtggcagacctggccccgggagagagcatctgtccctgaatcatcaccattctatccccctgacctcagggctgcgttcagagatgggcacatgaaccaaggtaacccagggaggaggagtgcagagctttggcgagtgctgccaggaatgaggctgctggtgatcattgtgggggcagccaggctgagagtgaagccctcacagaaggaaactggagctctatgacgtcattgatgagcacctagatgtaactgtgcctgaacttgatattttatctattataaataacagaaagcccaacttgaagcgttctaagttttttggctcatttatacatctagtcataagatagatgtactcgagtgtgtttattcagtggatcaatggtgccatcaagatcctaggtttttatttccaggcctcctcatagttatgagatagctgccagtaacaattttttccctcctagatcagtaaataaaagctcccaagccgcatttctgagattctgctccattgggccctttcttacatatgaaccaatcactgtgatcagtgagggaagggaatgcgctgattggcttaagccctggagctgggggtggggtctccttctctggaagtacagaagtcaaatgagaaagcattagatacccacaggaaaatctgagttatatcagaaaggattgatggcgtgaatgctgggaggaaaaacagcagtgtccattaaaactatcaactgctggacttctgggttatatgcagccaaatttttccttttgtccttaggccaatttgacttaattttctctcctttgtaactaaagggtagttattgatggtgataaatgctgtcactgggaatggaagtcagccatttctcaaccataccaccatataggccattacaacccaagtctactccccttcattttctccatggctcctatcacatcctaatatactagataatttattttatatattatcttcctcttctcactggagagtaagctccatgggagaaaagattgggctctgtgattttatcctggtgtctataacaatacctgccccaaacaatgtgctcagttaatatttgctgaatgaatgaatgaatgagtgtataaataagtaacatctatgtatgtcagaagaggaagaggcctcaaaaatcatctggcccactctctacagagactgcactggaaacccaggctcctgatggtaaacccagtgtggtccccattcctccatcttccatcacagcaataggaattccccgtcttccaccagccagcatcttctctgtccaaggcgtcacctgttttcttcagtttatctgttttcttcgagtccttgagtagtcacacttcttcctggctgtatatttgaattccggttattttcatttataactgaaaaggaagacaccaatgacctttgctggattactttatccactaagggctttacccgggctctatgcctgcatcttttgtctccattcatatctctcttcaagggcttctggaggtctctctcctacattcccaaactctctgatatgagtcaaagcacatctcagtctgactccagacagcactttgtaccaatggtcccctgggctgactggttgcaagtggctcacctgggcagtggaggcatctggatcttagacagtcaacggaggcatctccagagacttctgatgtccagatgggctatgttttgagactccttcttggctagggaccaaggaaacgccaggcctctcaggcacagatggtgcccaggtgtggctggctcagctgggctccaccttggaactcctaatgaattttccagctggggtgggtcacagccctggtgttctcttacaacccagtaggacttctgacctcaagagtggtcaagtagggttgatttaaggatttgatgctgctctgaaatcccaaaattctccccttctaggaaatcccaaactgttttgggccatgaagaacattatggaacagggcatttcatgcaaacaagcagctacccaaaccattgccctttgtgaattcaacaatcaacaattaattgaaaggttgaatgttaggaaatttgaagaaatataggtatttgttaaaactacattttaaaaaatgtattcaggtcaggcacagtggctcacgcctgtaatcccagcactttgggaggccgaggtgggtggatcacttgaggtcaggagtttgaaaccagcctgggcaacatggtgaaacgccgtctctactaaaaatacaagaattagccggccgtgttggtgcgcacctgtaattgcagccacttgggaggctgaggcaggagaatctcttgaacccaggaggcagaggttacagtgagccaagatcaaactccatctcaaaataaataagaaaaataaataaaaaatattttcaacatattcaaattttttaatttgaaaactcattctgtcacttactcattgtgtagcattgaacaagttacttacatcagtggttctcagatggggttcctggatcagcagcagcagcagcagcagcagcacctgggaacttgttcacgtgaacatcttgtgaccccagaccagatttacaaattcagagcctctggggaggcgagccagcaatctgtgttttaacaagccctgcagttgattctgatgcttgctcagttttgaaaaccactggtttaaaccatccaaactgtgtttcctcttatgtaaaatggaagtaataatacttgatctcgtaaagttgctgtaaggattaaattcaatagattttacatgtcaagtattcaggacagtgtccggcacttagtatgtgttcaatataagacagctacaattaaagttattactattattattggatttcttttctgggtggccaatgaatcagtctataactttgcgtgtctacctgtgaaataataaagagggaatatattttaacattaatcattataacagtagctaatgtattgagctcctctctgtgccagacacttggttcactacctcacaaacaagtgttcaaccctcattagaaaaagcactaagcaaatggtgccattattgtccatcttttacaggtgagaaaatagatttgaagagcttatgttaacttggccagaatcatacaagtcgtgagtggaagaaccaggaaaagaattcagagtgagattctggagcccggtctgtcagtaaatcaccacacgaccactctgaagaggtgtgcaaaaggcatgacagaggtagccatttttttacccaccatgctattttgaaaatctctatgaaatcagatattcaccacaacacatatattaactgtatggctattgattaatgatagaaggctctcaatcaagttttttcttaaaatgagtttttgttggtttattttattgtatttatttatttttttgagaaaccaggggcagaaaagagtctgttactgccgtcctctgcaagtcctccaaggagttctccatgactcaattcctgccaagtcacattggctatgcagtcacgagggggatgatttgttgatgacagatctaaagacggtcccgcatctgtaaccagagctgttccttctggttgcagtttggggcactgatcactgagaccaagggacacattccagtgtccattagatgagagtcaactggaaaaaaaaatgctttctttacatactgaaggtaaatcttcagtaaagattaaaaggaggaaatataaacatgtgacctataattattgctaagtatgtgttagcagttgtatttgttaatatgggtttggggcccatgatgaatgccaaatttataccatttttcaataccacaaaattttctgacacctaaaataccagtgacatcctataaagcaatttattaacatggatgagattatatgtacatcaaaggaatttcagaacaagctgctgaatttataaaatgaatatattttaaaactcatcaaaaatggtattgcagggtaagtatatgtttattcagtgcaaagtgtccattttatcctagagaatttgtaaggttacaaataggccaggaacaaaaaacctgtaggctttcttatttgagtgaagccagtaacttcgcctttcatttgagagtttctgtctaaatcttagaagcaggacctccgtgatatcacaatatgttcagtttagcataaaacttcgctgtgtccctaaaatgacagtatcaacaatagcaccactaagcaaacactcgttttggctactgccttttattttatttttcccccctcttcttagctccacccagctcgctcttgaaaggccttctgttctgtcagccataatgacatctgctggcggacacaggaagtcataaatctgtaggttctctctcaaccaaaccttgttaatgctgccatttatcactggggctggggtgccatctctggagagctggacgcagagagtccattttctcccatacccctttcccaagagagcaaccattttaaaaacagccactttttcatctcgcatttgcagacctaaatgtcaggcagatgcaaaccccactgtcaatgtgcagctcttggaaagaagccatgattccaggcaacaatagactcgacttgatgtttcaggattgaagcaaggcagttgtgactaagctctgtccttcctcattttaaataggcccctgacggcttggaggagagggatggaggattctgtccgtccaagcccctcttctccaggacttttctaagggcaaaacttacgacagggagagttgaaagaggattatttaaattcagagttacttttgttctgaactaatgaaagatgatatgtgggttttatttcttagaagtccatggtgccctaagcattgattcaagacctccacctatgacagatattttctagcttttgctactcaaagtggggtccctggattcgcatcccctgttagagcctgtcagaaatgcggcatctggccgggcgcggtggctcacgcctgtaatcccagcactttgggaggctgaggtgggcggatcacgaggtcaggagatcgagaccatcctggctaacacggtgaaacccccgtctctactaaaaatacaaaaattagccaggtgtggtggtgggcgcctgcaatcccagctactcgggaggctgaggcaggagaatcacttgaacctgagaggcagaggttgcagtgagctgagatcgcgccactgcactccagcctgggcaacagagtgagactctgtctcaaaaaaaaaaaaatgcagcatctgaggcaccactcaagtcctactttatcagaacccacattttccacaacatcctcaggtgtttcctatacacatgaaggtttgtgaggttgtgctctacattgaggttctcaccttgacactgttggcatttagggccagatcattgtttctttgcaggcctctttcttgggcactgtgggatgtttggcaacatccctggtctccacccactagatgccagtagcaacccctgagtcgtgacaaccaaaaatgtctccagacttgtcaagtgtacccgggagagcaaagtcacccttgtggcaactcaaaagtgtggtctgtgtactcgcagctgctgtgtcatctacgagcctgttggaaatacaccttctaagaccccaccccagacttgctaaaccaggagctctagaggtgaggtgcatgaatctgtcttaatgccctgggagataatatgggtgctaatgtttaagaactgaggcttcttaaattctcagttgctgaatgtaagcagggaaaagcaatgcaagaaatacctggatttgggggatataaaactcactgtggctgcaacactgtcaagagggagtaatgcatggttgttaagaataaaacaactggaggcatgccaggtttgaatccaggcttcccaatttgctatcgccataaccttgggtaagttacctaaccttcctgtgcctcagtttcctcatatgtaaaatgaggacaacaaaagcactttatcaaaaactggtttaaggactgggtgcggtggctcacacctgtaatcccagcctttcagaggccaaggcggatggatcacttgaggtcaggagttcaagaccagcttgaccaatatggggaaaccctgtctctacaaaaaaatacaaaaaaattagccaggtgtggtggcacacacctgtggtcccagctacttgggaggctgaagcaggagaattgcttgaacccaggagctggcagttgcagtgagccgggattgcaccactgcactccagcctgagtgatggagtgaagccctatctcaaaaaacaaacaacaacaacaaaactgttttaaggattaaggagttcatattgtaaagtgcttagaacagcgcttggtaccaagtgctttggaaatgccagttgctattatgatcatgaccatcatttgcctgtctttccctcaatgtttaagttccctaagagccacgcaggtgctttcttttctgccacatccccaatacccagtcatgcacctggcacggagcaggtgcttaatgaatatgagtggagacagtgggtcggcctgtggagggaagaggacgctagcaggaaccctctgcagcaggaactttctgctccattggcttgaacttgtactctgttgtctgtacttcctgcatgaggacaccagcttccctgatcggttttgtaaattggcgcccttgcaaatgtaggggattgagccaaagtgaatgttattcttcggctcagattagattggacctctgatatatctgaaaacactctgtaaacaacaatcaacaaatgtttataaaataatgaaaaaactaaaaattggggagtactttctatgtatcaagtataatgctcagtattttatatttgctcatgtgagtctctctctactggtaatagtcagtgatataattattcccatttcacagatgggaaaacggaagcccagagaggctaaacaatttgcctgaggtcttagtaaatggtgaatttttttaaagtgctgctttctttgattccaaacccaaacttaccttttgtcatgaagtctacctgatctgtacacagtgatcatatgtcctaagacttctgggacaatcctaatttgaaaccttctgcccccattttatgcttaacacactcataaatgtcagaccgcatgtcttttattttgtttaaaaactcaaactgtgatgataatgagagctctgcggccctactagagatacaatggggaaaaggaaagaggcccctgctcctgaaggagctcacttttggggaaagtgaagattgaccaaatcagggaatacaaaagacttgtaagcaagtgcaaactacagattataaacaataggactggacaggagagagcaaccaaaagaggcatggaactaacattttgaactcactggtgcacttggtagatatttattgaaggtctactgtgtgcctggcattatgccaaaaagtagaggtgctgcaggaagaggaccgtcttgttccttcccctcagaaagctcacagtttagggtattctactccaacagaagttgcctgcttgcccatttcttcacacaccaactctactaggaactgccagcacccatctcttttgcctccagggaaggccagaagtggccctcacccaatggctggcaggagtaggtggatgaataccccagctctctcaccctttaggagagacatctcgaaagtgcagaatctacactacctcccagcattcctagcaggattaagctccagtggcccacagtgataacttgcttgttaacacacctgtaccagccaccttccctttctttactcactttcctactccccttctggagttttctagaatcaactcccaaacagactacttgcacacaaatctttatctcagagtctgcttcttggggaagcaaaagcaagacgcaatctttctagaaagagagtttgcaacagccctagactattcaaccatgttaagcccatgggttccttagcctcctgggagtgcccagtaatggttaaggaaaaaagacaagctgtattgttgccttcaagacaagacgctttgacataatcctagcaagcaggggtagaatctcatgaaattttaaggacaataggatgcttaatgcctaatcataatagataagacatgctctggataagacagaaaggtgttctcagagcgaattatatccttctctatttgcttctgaaagttgaggggcacctttgggcacacagttctaatgagtccaggaagtagagcttgatgcacagttgagatggcataaaatataccagaacttaaaggctgcttatcacatggtttccaggctgctcccgtccttacattcatttaatgtcttcctgtggttaatgaagttgagcaatggattactgggccagcgacttggtttggattcttcaggagcagcaaacactgtcactgactgtaagtagccaactccaagggagaaatgtgatatatgttaaatctaacagctcccatggccccaatcggcccagtcagcaatcattccctttaaaatatacataatgcttaattgctgttgcaaaattctacacctaaccaaatcaaaatagttctaaaaacgagtgcctagtaactcttggaggatttattcttagaagcaagcttgccaatgcttgggcattcccgaattttattgtcatcaacctcacctgtttttagaaagcaaatttgcacccagttaaatcagacatagtttctcctgggttggttgtaagtaaatgaattgcattgatcaatagctggaagaataaagttcaaacttggtatgatgactgacctcctcagtggtctattcccagtccatctctcctgcctcatttctgcttccctctctctggctgcttctctcgatctcagttctaacagttgcatctttctattcctgaagctcagacatctcttccaatttcagggctgggatcctgattgggtgcttccagatctcagtttaaatgtcacctcctcccagagcctttccctgaccccagccctaacgtgggctctgccccacccccgtactctctatctcaacactctcaacaccctgctttattttcttcctgtcactctccatgatctgggacttcctcttgttttactctccccaacgtgatggtggggatttcctgggaaagtagaaaataacgagagattgctacctataagttttcacaaaatacttgctgggaagagggatatcttgaacgagttaaatgacataagaggaaggcatgacttacatcctcaagggcaacatcgtatggtacactggctctcaaacttggccgcacattggaatctcctgggagctttaaaaaatactgtcaactgaatcccacccccacagactgatgtaatgggtctggggtaaggcctggacactggaattttttaaatcaccccagctggctgaaatatgtttgagagcactgctttttatacttgaagcattatgcgcatatacagaagggcacaaattctaagtgtgcagctgaattaacgttctcttattgaacacactggagtaactagcaccctggttaagagcaatcccagcctctcagaagcctccttagacccaccctccaaagtaaccatcactatgataggcaagcataaatttgttctctctgcttgtgtactaatacatttgggatcatagtctaccttgagactctttgttttgaaaagatacggaccagagaaggatgcatttcaaaagatccacccaggaagacttcttggaagaggtgatatttaagagaggatctgaaggaggcaatagacaagaggaaaggggaaaagggagggaagttggtgaggggaagacagcatcaattgagaatgagacacataagctaaaatgttatctccatatctaatgaaaaccctattggagcagtgactcatacagtaatcccagcaccttgggaagctgaggcgggaggattgcttgagccaaggagtttgagactagcctgggtaacacagagagaccctgtctgcaaaaataaaattaatagagtgtggtggctcgaacctgatatccatgctacttgggatgctgaggagggaggattgattgagcccagaagcttgaggctgcagtgagctatgatcgagtcacggcactccagcctgggagcaaacaagatcttgtctctaaacacaaaagaaaagaaaagaaaaccctattgcgccaaaggtatttttaaaagaccttccttgcatgtatcctcagcttcatgttcaatccttccacagatttttaataagcaccaatacggtgctcaacctgaggatataaatgtgaatttgggaagacagacaggaaaaacacaaaaatacatgaagaaaatacagagaaagagtgggacagatagggtaggcaacaaaggtacatttgagtttagagtgaagaggaaagatagatctggaggaggaactttgtagaaggaaagaataagagtaaaggtcctgaaacctatacaggaggcactatggtgactgagacattctctctgtgctcaggtatcacaaggctaccccaaagcccagtaattagagcactgccctgcacaaggtaggtgcttggcaaatatttgtttaattgcatcagtggtaaaacaggtgaactaacaacaaattcgatatgttgtgtgctttgagggggaggattgataggcttctacagtgtgattagaagacttgagtgaatccaagaacaaatgccttttctgttccttgcatgcaagaaactctgcaaactctattcacttgttataaaattcaacttttgtacagaaaagtttcctatgcctagtgccttaccagaatcacctgggacctttaagattttgagatttttctgacaccaccctggaatctaatttagtaagtctaggatgtggcctggggttctttatcttgaaaaacaaaaaatccccaggtgattctgatgttcagccagcatgtgaacaactgttctggaaggtagggttgagtcattccaatcagttcatgcccttacacatcccaaagttcgagtgctggatcctaggaagcgaagttccctggagacttaaacatagcctcatcccaagacaccagctcttataagaagtttccccaagtgccagagtctatggtttagcacagtattttccaattctagcaatgcccacaccatctctttcacattttgccatttccacatcccacctgaatcactttttactctctattgttcctttaatatacttatttttaaaattccacttaatgggtttaaatattagattgctcttacgcaaggagagcaggatctttaaaaacagaaggtaactctaaatcgaaagcattaaaaacaaaacatttttttaattcttttttttcttttactttaagttccgggatacatgtgcagaatgtgcaggtttgttacaaaggtatacacgtaccatggtggtttgctgcacctatcaacccgtcatctaggtttttaagcccctcatgcattaggtattggtcctaatgctctccctccccttgctccccaccccaacaggccatggtgtgtgttgttcctctccttgtgtccatgtgttcacattgttcagttcccacttatgagtcttatgagtgagaacacatagtgtttggttttctgttcctgtgttagtttgctgagaattatggctcccagcttaatccatgtcctggaaaaggacatgatctcattcttttttatggctgcatagtattccatggtgtatatgtgccacattttctttatccagtctatcattgatgggcatttgggttaattccaagtctttgctattgtaaatattgctgcaataaacctacatgtgcatgtgtctttattttagaatgatttataatcctttgggaatatacccagtaatgggattgctgggtcaaatggtatttctgattctagatccttcaggaaccaccacactatcttccacaatggttgaactaatttacactcccaccaacagtgtaaaagctttcttatttcttcacagccttgccagcatctattgtttcttgactttttaataatcaccattctggcatgtgatgttatctcattgtggttttgatttgcatttctctaatgatcagtgatgatgaggcttttttcatatgcttgaaaacaaaacatttttaaaagtctagctagatactcttgtccctcccaagcttctgagcctaagatccgtggtatctttgttgaaaaatagaagttagcaagcattaggtataaaagagacacgagcacaaaatggttattttatcagattgaaagagaattgaaagggaataactttcttactatgtgattcaatattatttaacatcttgtctacagcactgggtacatagtgttatacatcccgctggtgtaagccaaaaccattttcgtggataactaagctaactattagtaacggtatgaaaaaatacaaattaataaaagaacatttcagaaatgtagatccaacaatgtgttaatagccagccagaaagtaggtactgcagaattgttacaagtcccccacattatataaccagctattgagaacaaggagagagcggatgtaaaattctgagaaggatattggatagaacctcagggaaattctgtcatccaaagtcatcttctcctgcccatttccttcctgattgtctccaaggctggacccagcttccaaattccctcttttttagttcccagtctttgggatgttattataacatccaaaagctttttgaaggtgatgatcctaccttatgcattccaaaatctgctgtgcttggggcaaggcctggtagacctaacaggcgcagtagatgtctgtgaaataactggctgaatgtaacacaaacaccacaccagcaggcatggggcttgcacagagcatggcggcttcatggtgaggttgctgcagcttcactcctcttctgttcaggcctcctgatcctataaacaagtatcccctaatcccacaacggtggttccttggctgcaaggctgtgaggttttattcaataggctatggtcccttgcacagtgctctgtaaaaatgtattgggtaattagaattaataccttttttgttgacattgccaactatgaaatcgggctttttctgcctcagttgcctaaggactaggctgggactgggtggagttggtcatgggtggaggcttctcgggtgatttagggcaagtgagttaacaacttgtaccacacatgtgagatggagaagtgcgtgaggatgttaaaaatgattaaacagcactttgcaaacaatcacaacaacactttgtggctgacaagtaggatagggaaagttgagtgtcatacagcccaaagaactgttaagaaaaatattcatggaactagtcagaactggtagttccccataagcaggtgggtgggttgtagtgggaagtgtcccagatcagactgggcaggccttgctggggtggtggggtgggggtgatcatggtgggaggaggagtattgaggagtgggcacaggtgaaaccccatcgcgacggccaccattacaacatcaccccttgaacccttaagttacattaatatctaagcctgacttggctttatagttaacaacattgagtatgtctgattacaaaagaacaaacaatttgggggcagatgttctctaactggtgtgagcagaagtttcacttgtagggatggatgggttacatgttcaaaatacagatctctaagccttcatccggaattttctgattcagaagatctagggtagtgatgctaagccaaggacgattttgcctaccaggggacattgggcagtatctggagacagtttgcattgtcacaacggaagcctgggatgttcctaaacatcctacattgaacaggacagcccctcctaacaaagaattatcagaccttcaatgtcaatagggcctgggttagaaaatcttgctctagggcaaggaccaggtacgtgcatcttaacaagggcctcaggagattttaatgcggaagcagaagccttacacggtgtctttttgatacaagggcttcagtatcagagttccctttttgcctacccgtttgttatatgtaagactcagctttgacttacctcttcccttgaagccccgcctggtaaccatccttcctttcgccaagttcagggtaatcactcctcctaagaacaccttcaccacatacttataaccaactgatctttggcaaagcatataaaaacataagttgggaaaaggtctattccagtgttctccagcctttttttcaccagggactggtttcatggaagacaatttttccatggaccagggcagggtggatggttttgggataaaactgtttgacctcagatcattaggcattagattctcataaggagtgtgcaacctagatcccttgcattcacagtttacaatagagttagagctcccatgagagtctaatgcccctgctgaagtgacagagctcaaatggtaatgcttgcttacccctacctgctcacctccttctgtgccacctagttccttacaggccatggacaggtgctagtccatggttcaggggttcgggacccctgccctattcaataaatggtgctgggaaaattggatagccacatgtagaagaatgaaactatccctgtctctgaccatatataaaaattaactcaagatggattaaagactttaaacataagacctgacaccataaatattctagaagaaaacctaagaaaaactcttctggacattggcttaggcaaagaatttctgactaagccctcaaaagcaaatgcaacaaaaataaataaataaatggagcctaattaaactaaaaaaattctacccagtaaaagaaacaatcatcagagcaaacagacaacctacagaatgggtgaaaatatttgcaaactatgcatctgacaaaggactaatatccagaatctacaaggaactcaaacaaatcagcaagaaaaaaaaaaaaataatctcattaaaaagtggacaaatgacgtgaatagacatttctcaaaaggagacagacaaatggccaacaaacataatgaaaaaatgctgaacatcaataatcacagggtaaatgcaaattaaaactgcagtgagatagcaccttaccctagccagaatggccattattaaaaagtcaaaaaacaacagatattggtgtggatgtggggaaaagggaacttttatacccactgctggtgtgaatgtaaattagtacaatctctatggagaacagtatggagatttctcaaggaattaaaagtagatctaccatttgatccagcaaccccactactgggtatctacccaaaggaaaaaaagtcattatgtcaaaaagacacctgcaggcgtatattcattgcagcacaattgcaaagatatgaaatcaacataagtgcccatcaactgattattgtataaagaaaatgtggtatatatatctatatatgtgtatttgtgtatatatatgtgtgtttgtgtgtatatacacacatatatatacaccgtggaatactactcagccatagtaaagaacaaaataatgtctttcacagcaacttggatagagctggaggccgttattctaggtgaagtaactcaggatcaaaaaccaaataccacacgttcttggttataagtgggagctaatgcatgggtatgcaaaggcatatggaaagatatcatggacattggcaactcagaagcgaggagtatgggaagggggtgaggactgaaaaactacctattgggtacgatgtacactactcgggtgacgggtgcactgaaatcccagacttcaccactatgcaattcatccatgtaaccgaaaaccacttttacccctaaagctattgaaataaaaaaaataataaagcaaaaaaaaacacctctagtcccagcctgcatcaaatgccctcagttgctttgccctctcactggaaggagcactccttgagggcatggtctaggttcaccttgttcacagacttgcccccaacacctcaaaaggtgcctggccgatagcagaactcaataatcacatgtttgtttcaatctctctgtgctcaaatgccatatcctacattgaatctagagccacccacccccttttagacactattacagcactcagcttaacgtcttcatggagcgaatcactcaaagtatcctgtttatttgcttgcttacttttcattcattcaacaaatattttactgggcacttattatatgtcttgtgctttgccagcacttggggatataagagaacaaagaggcaaaaatccttccttccattggagcttacattcaagaggggaacttgtacaatcaacagaatagaaaactgtctataacctgtgtgacactcactgatcagctcactggggaataacaaaatggagaaatggggcagggagtgtgtgtgtgtgtgtgtgtgtgtattttaggtgaggtagacctttgggaaaaggggacatttaagcaaagattggatagctggggggcacttgtctgcactcccccattagaatataaataccaacatggccaccaccttccctttctctgtggcctctgtgtctccagaataggcacatagtagatgctcaataaacattcttcaaaggaaacaaaaagaggagtatatgattagaccttaaagtagacagaagggagatttttgtttttgtgaccacccattgattagcgagaaagtgggagggacaggggcactaaattgaaggggtcgtggggagcacattttggtgggggcaggttaagacttacaggatggagatcctcactggataaggtcccctcccccttcccagccccgagcaaacctaagttctccctctcctaagattgtgcatggtccctgctggtcagccaacctggcccccctgaatctccctccacagcctcccagcttcagagttcagccatcatcacactgcctccttttctcccgcaccccttccctcctcacctcctttcctcccgcccccgccccttccgcctcccggaggggtgtccccgcgcccggtgggcacgccctcgccccggcggagagggcgcacagaggggcctgggccggcgcgccggggcccccgcccccagcccctctcccctgcgggacgctgtccctttaataggctcccgctgcctggcgctctgcggctggggagtaaatttctccctgtcatcaggtcgcggggagaggaggaggaggaggagtttgttaatgttcagtttgttcagcgggatcgatgtttgctggcatcgcctcgccctgtcttgtgtgtgtgtgcgagggtgtgtgtgtgtgtttgtgtgtgtgtgcatatgtggggggtgtgagtgtgtgtgtgcgaggaagcgggggtgcgtgcgcgtgtgagtgcgtgtgtgagtgtctgtgtgtgtgtctgtgtgtgtgtgtgagtgagtgaattccagattttctgtctttccaaaacccgctcctgtcctctcgcatatcactcacagacggggatctgacagcagccacaaacctacagtgagtgatcgctctccccccggcacgaatccgccatagagatcggcgaggaggaggaggaggaggaggaagaaaagaaggaggaggtggaggaggaggtggaggaggaggaggaggagggaaagaggagaaggaagaagaagaaaaagaagaaacccactaccttcccaggattgccttttttttttccttatctttacgcgcgagtgtgcctgtggcgcgtgtgcgcccctcgtcccttccatccgaacccgggcttggatgtttaataaagaaatcaagtgtctcaacagtcaccaaaaaaaaaaaaaaccgcaaaaacaaaaccaaaaaaattccaaaagcaaaaacaaaaaagagagaggaaaaaaaattcaaaataaacaaacaaacaaacaaggcagaaccaacctctacttcaaagcagccggcacaagccacccgtgtctgccacccagagaggggggtctctggcccgtggtggaggagttgcaggggggatcgtcagggggacagaggccgagtgacgtcctaggagccaccgggcaagaggcggaggagacccagagaggccagagagacagcgggccccagcgcgcggctcggggctggggcgccagaagtgggactggagcgaagtagaggatgccgaggagaaaacagcaggcacccaagcgggcggcaggtaagagaaacggctccgcttcggggctgccctgtgcgccgagctcctcgcccgccctccttgcccctgggtgcccgggggcaccacccacttaagctttcgggggagtttgcgccgggtgcccttctaataaccccgtcctctctcgccttctctggtctcccaaatcctccccttccaagctccggttgggttggggtgagctatcccaccaagcctttcctccttaaactttctttcctccaccctctaccccacccctaactttcttccagtctgtttcttgcctctcgggccaaagtcggattgaggatttggggtgcggagtagggagacagcccctccacccctgcatccctctgcgtggtcagtgccagtggcttttggcctccagggatagcgtctcctctcactggggcttggggcgctgaagtgtgaggcatacctaacactcgggctgcaggcaggctttggggccagcaataggagtttagcgttgatcaccaaggtggacaaaatgcccccaggaaatggatgactctttgcatatattttctaaaaggatccatatttggaaatgtaattaacaatttccctattctttaaaaaaaccaaaaagggttgtaggggggaaattccccatagaaatttaaacagctctggattttctttgcctagagagttgcaaactttgtgaaatgattcgtactgtaaaaactatcccatctgaatccttactgccccctaaaaaagataagaacaggttaatggatcagtacaatagaccttctaaagtttttttttcttttgggttgcttaattgcttttttaatagtatgctggggttttgtttctcggaaatgtaatatgaaagttcatttttcttctgccagacccacccactgaaaaatcagctttccacttgattgctagttttgatttgacatttgattgatcacctgtcatctcgctgcctttgatctattcattcttgatatatatcaataaatcactcaccatggtaactcagagtgccagtgacgcaaaccttgccctctatattcagagccagacatgcacaattattatcttgtttggcttttaatgtgggcgtttttatttctttgtgtcctttagttgaatcagggctttcgcaaaaagcttaagtttagttgttttttcctctctctctgtctttaccctcttgatttaggcaacattaggtaagactggtcttctgcagacccacctccacatttcattctgttccaactctagcaaaacatagggagaagtttggtggaacactttcataaactttgcaaagtcacccttagaacaaatccaaagttagttaggaatctgaggagagtgggcatcccttgtctgaatgtgttgaaccaccaagctcatcctccttcctcgcctgagtgtttcaaaatatccacaattatcattccttctgagcacagaattgcttccctatttgtaagttggttcaagtggcatgcagaaatattgataaagcgtggattcatatattttctgatcgtttccctaaaagcaaaataattaaaatatttttagtgaggtacgtatttggaacttgcctcatcagtgaggttttcttttttcaactctagttacttctttggaaaacaatgtctctttcctaccgttgtctctttctgcatttaactcactgatttcctaaaacttaggctgctttgcaatctgacagcgtgtggatgtgttcaatggcctttgagacccaggaacagtgagcctgctgcatctagttctggcaacataagtttaagtgtagctacattattagagataacgtccttattgttgtcccgaaagagaaccctgggctacggtccagcaagaagtgatactgccctgaaaattactctttttttttttctggttgttccggtaaagactatcaacaactaggcagtaatttaaattaccagaatgactggacatgtctcctttagtaagctcattacaaaaagtgcattgctcagaattgctcgactttgattataattatcctacgatcgataaggatccaggtgtacgtaacataacactgtatcacattatttaaatcaggtccttttcattaagctgtgtctgttggtgctggctagtttattggtgtgtgtgggtgtgtgggggtgtgtgtgtgtgtgtgttagaaacttgtaactatagtttcagttttctggcctattatattcctactgtctttgtatgtttgttttgtatgattcttattattttcaccagaagcggaaaccctttttaagctgaaaaaggatgattcatttcgtacacagtgagggccctcttaccttatttatttgctcacatattaatagaggagacagtttttcatgcagtgtttcttctgttcatctaaggtcatcaatgccctactctatttcagctgaagtggttattcacaagtaaagttagccactttggggttctgtagtcagttaacatccagggaaggggagaaggtgggttctaagattatggccatactaacttttatcactgcttaaaattaaacacaatgcacaactgtaagtaattacacccaaggactgatgttgaaagcttgatttctagcttgattaatgaataatgggagatagaaaaagcctgtgagtggatccgagctgaggctctcccggagcgctctttttcccaagaactgttccaggcaatttgattcctttgtattattagttataagttccatgtttcaaggaatcaattacagaactttctactaaagcaggtatctaaacagaataaacaagatgatattgtaagtgatgaggaattttagtctttatttgttatgttcctcccccttcagggggaagggatgtgaggggacaattctctttaaggaaacagctaaatcagagtatttccctctgaaatgtcattcttcctggctttcttaagctatgctattccaccatactattacttagggcaagaaaaaaaaagttgagaaagcagcctacagtaccccaggggtttgtgttgtgtgtgcatgcttgcttccttggatgtatatttcactcaccattaaaatacatccactattacctgaaaatattgcaggattcagtaccagcattttccccttctatgcatttcaagggagatagagaaaatggcaggaaagtaaaacagaacggtgttttgatttgtttgcattttgcaggatgcagagtggttaaaaatttaaaattgtagacttagaatctaactcttgattttctacagcctatctcagcctctgtgcgcgcacataaataatacgtattttatttcaccatactgaactgcttttatattaatgacagccaattgcaatagaacacacaatcttttgtgagcacatcttgtgaatatatcttttatatatgtaagttataggattctgcccctgcccacccaaagcaattagatgtttccctcttgctgactcttaaaggctttctgatcacccagatctgaagagtcttgcaagaaagaacagctccctcaatttattttgtttatttaatatggagatgaataatgcagattttgttttcatgaatgtccttgtgtggcagtaaacattagactattagcaatcattacttaaaagttgcaatttgcaccttaataacacaggttatttacatgggaaacatagtcaacagggacaactctgaacactgcaacagagcagaaatgacctcagagatctcttttccacctcttgatagtgatgactctgaattaaccggtgaggtcccagaaatctcaaccaacaggatggagggagggggcaggcagctcagggcgaagtttacctttaatttactgtcaagtgggacagctttcaagagactaggaatcgggtagatttgggacccttcctccctcactttgtttaaacatccttcagaaagacaagttcacatcttgaatatttaaatatctcacgcgatggattccttcacttgcccaaaagtatgtttttaacaaatgaatggaaaaatacacacacacacacacacacacacacacacacacacacacacacacacgcatggacacaataaagtccaaagggtcttagcagcacaaactcttttggccattcttgttacttaaggcagatatctgaaaaaggaaggatagattccttgaaatcgcttggtccacacaacattttggacggaaattgattgcttaagtggtccttttcccacccccgtcttgatttccttcttccacctctcacctcacccttaaagactcagactgaataggacatctcaaaagcccatttgttttaggcatttattgatttcatttttaatctgccatatcaggacacaatacgttaaccctaatcagcagattacaagtgacagagagtttagtggaaactctgtaagggagcaggggctccgggaaacttcttgacaatgaaaatcttctctgaggcttaagagtttggatgctgaagattacttttggggaggggagaaacattcctcagaaacagtctacatttttttcttccactttacatttctttatctcccagttgcccattctactgctacactttgggaatgcttaacacccaagaaatacctcccaagtatttttaggaggtcggtccctgaagcagcttgacttttgtcatagtctccaacggacgtttatgctttcatttcatcccagctgatttctcattcatttgacggaatttctccaaaggataatacctgagttgatctgtttcttttcccagggccttgggaattgtgctgtccattgaatgggttttggtcatgggggtgggggcacagactgagcctggcattttttaaagccattgaaatgatgcctcactgttcatcactgcagctgagcttatcaagtcaaccaagaagaaaacctaggccctggtcacgtttgtgctatgcctgtaattagctgacacgaggtaaatgtccaaagtcgaccttcccttccatcactgtatttatactatcaattttatttgggaatgtcatggtctgggaagactcagccactatttcgaaggcaatgcctgcttctacctaggtcccctttaaaaaaacacagaaattgccgaacaaattctatattaagaccaggcatacacggagtatcattttcgtttgatgcaaagtcagttggaaatacatttaactaacagttaaatagtgtcttgcatcgcttccctgaagcagtggtttttcattacatatttaattacaatcaaactgaacgacttttattaaaaaaatcacagtggtattaaaagaagcctggcgcacaaataattttattgcttcacaagttgagaacgcttttatatttttatttctttgagagaaatttattttaattttctaatgttgtgataaatacagactatcttttactgtagtctgtaatcagggagagcttatccttctatctttatagagtctgcttaccccagaataggtttttacattcatttttcagtaatttgtaacaattggtatttttaattttttttttaagttttacaagttctatttaaagttagaaattctcacattccttagggtgatctttggcaagcagctcttcgattataggaggaagttagtcattctaaccacataagaaagtggagagtacttgcttgcttacctgaatattacagtaagaaaaaaacaccatctatttacatgcctctaacatgtaacactattttcactggatttataatttcttttttttttcctcctactgacctttcattcacttgttttgggaactttttctgagaagaacgtttagagatagcatttaaagtggatttcaagatacatcagattttaagacattgtaataaaaattagagacttcagagcccaacggttcactgctagtctaggtctgcaaactaatgagaaagcacctctgcaaacacatagtttcaactttaacttgcacatgaatggggagcgtctccagcagtgtggccgtatccatattgctcattttgtccgagaaattattttgtccaagggtatcagactgaggtccgttcaaagacattatatacatacacagagacacagaagagaaatctgagatgcgagtgggaattgctgatatatttgtttccaaagcaaactccatgaatgaaatgattcaataatttggaggcatttgaaagtcattaaaatggccatttggaattttcagttgttgcctccctcaattttttacgtttcccctgtagaaaaagacatcctctgggcaccctcaaatattctgggatgctaaagtcatgctaaaattatttacaattttagaaattaaaattcaggaggcacagcaagataatccgattattaatatatcagtattatttagctatgcataacaacaggaaaacgcacaatgcaaaagttttagagataatgagcttagagaaattacatggggggaagaaatacctggatcatatttgaaagcatttgtcttgaattctgctcatctaaatgagagctctctttctacctgtgtcatttaaaaaacaatttcaatatcctcctacctgctaccccagcctgaagcagggactaatgaaactctctctggacacacagatgtaagacactatattacacaacactttttaaaaaattgtttcagaaaaccaaatgtgggcatgcaaaccaaaagaaaaacctcaaggatcttcgtaagatagctagctcagggttcaagatcaagagaactttgttgcggcaggataagaagacaacagcattgcgttttagctaaacatctcttcttggcaaatgagaagcggtgaagcagggaagatttttttaaggagctttttagctcttttgcatctctctccaaagactaatttaattgaaaagctgtagtgtccatttatgattaaggaaaggcctcatgtttccacaacactgctagacactaaggtgggtttgaagaaaaaaaaaaaaaggccagcattctgcagtttctgttagtataaaaattaagatcactggtcttaattacttgagtgctttcagaactgaaggaatactctaaaatcacccctgagctttcttcttaaagccacatctaagccatttctatggaaattatatagtttagatattaaggtgggtagaatacagttattgcttttaatgaaaatagttacgaagggcagaatgagataaaaacagagttggcagcagccattctatttgtaatgaatttgaaagaaacttccgtaatgctttactggatcatgaaaaacccatgaaaccttgtgacatgggagatacaaaaatgagacagagggtcaaggtcttctataggggaaaaatggcttgtgtaagtgagagcagtggcatataaatatctctatataaactgcacagggcttactttaaatcacttcaatttatcagatccttggaattttttttatgtatttaggagcctctcttttataccccagagagatatgaatagcttctgggccaagatgatgctgtagagaagagtcaaatctattctatgtgcacggtgccatttggtacagaagaaatgccaaaatgaaaagccataaatgcgttttatatcagaattgcctttggctattttcctttattagaaagttgggtacactgctgagtgcttcttcttgttttcccccttgggattagatttgagactgtggatggaacagcggagtaagggcaagtgacttgggttctggttgcagccttgccccacgctagttatttagccccgggcaagctctagagataaaccttactctccgggtaagaatgtgagtttttggagtcagactgattgaagttcaagtctctaggtctaattcttattcggccgcgtaaacttgggcaggctgctcaaatctctgccctccactttctaatctataaaatgggggcaatcatatgttccaggtgtgtggaaaggattgtgtcagaggagggctgagaaagtgtgctgaaactgttaggcaccacagggatacgagggaatagtgtgtctttaccctgaataaccagactatggaaaatttatattaactgggaaacaagcaacttaccagttatcacagaacaaggggtccagggcttgaaagaaaccagatatggatggattttgatttgtaagcctggaaacacaatggctaagcagtgttttagcctcttctcctgaggcagactcattctgggctgtttggagtccagcacccgctcaaaaaagagtttctttcccaagaaatagaatttatagcaccaccaacaacggtaacaatggtaacaatgatatctgccactaaacaagtgctttttacataccacgtgctttatatgtttacatttattcgtttacacggcagttatttcttgagttcctactatgtgtcagatgctgttctactacctggacctggaggtgaataggatggggatgatccctggggatcttgccctccaattgggggaagctagagaatatacaaagaaatttataaaggaaaagataatttcagtatagaaaaaaagcttcatgatggcaatagctttataaaagcaaaattatgagagcaggagttgggacaacagagatgtagatggtcaggggagacctctcagaggaggggacatctgggctaagtcctgttccttataactttcaagtataatccctgttttactgatgagaatctgagtaagttgcaggataactcattcaagttcgtgcggtagccaagctgagttttaaactcagctcttcctgcttccaaagtccatgcatttaatttattatgatcgtttatctagaatagtcatagcgagttgccaggaaggacccaaggaagaaccctcagtcttattattctccccctgtgtctattgtgatgtctaaagctatggggttaattgagagcctagacggaggatgctgcctttagcggcatctccagatagaatcttcaggccaactcctgtcatctgaagttgtctctttatgggatgttctttcatatgtccgtacatgcattcatttgttcaacaaatattggctgtgcatctattatgtgccaggtattgttctaggtgctgtaaaaataacagtagacaagaatagagatgcccctgccctcacacagctaatattcttgtgggctagcctaaaaagctaacaaacaaataaatatataacacaatattgaatagtcctaattgcatttcataagaataaatctggcttcatgaggtagagtatgatggagggttgccatgttatatagagtggtcaggggagctatttctccagtggtgatttgatcagacctgaaaaaaaagtgagagactagccaagcacagggctgggagaagcagtccaggcagaggaaggaggaaatgccaaaggcctaaggaggtgatgtgatctgattggttattagttgaacataggtcctgtttgtatttcaaaagtgatgatggacttgggcatgtttgctctctccgtctacttacccagcccctagtgatggtgagtaggatgcttaggatgatagaggtggcagctggagataaaaacacattcccagccttcatagagagattggtgctgtgatggatgacatggcgaggctgtggaaaggcattgttaagagtcaagccgacctggggtccaactgcagccagctgtgcactcagaagcaagtttcctcacctcattgcacctcagcgttttcatctgtcagatggggataagaattttgctcacctcacattttacttgtgataattagattatgtgacacatataaaactcttggtgcgggcccagtatttacatgggttcttcctcacaaatgaatgttttttattcttgcacttaattgtgttttcttttctgcaggaattctgagagaaatctaggcacctgagttagtccttggcaccgtttaggcagtaaccaaatatttcctgatgaatgaataaatgaaactgtaaagaaatgaatgctttcattcatatattgctttgtatactaattaattactttcaagtataaggatctctttcataggtctaaaacttttagcagacctctggaccaattgcaaatcctagctgttcttagaatatgtttcaaatgagaaaatattaatgaccaaaagacgatgattttcgtctgaatcttgtattttgcgcatcgtgacatcacgtgccttcgactgaagagcagtgatatccctttgtgcggtaaatattgtgcattcatcttctagacagtgcttgctgagaacatggatggaggggaaggagtggagggtcctcatttctgaccctgaggttcagcctctccctgcgcgctctccaagtggtgctccgagccccccaggacctggcaactctgtccctcccccacggggaacccgcgctcatcccctcaggccccaggcggcgaagcttaggggttgttaagctaatgggaataggctacgggctgtttcctggtaacgccttcttcactttttaattgtcacctccagataagtgcctgagagcaggaagaagggaagctggctggctgcctgttaagatgtatcttaggacaaagagatttgggatcctggagagcacgggggagattctgctgcctgccttaggacctttatgaacaagcgtgatgttgggagggcggctgtggctgtgtaccaggtgctgtaggaggcgctggaactggagccttgcatccgaatgacaaagtgcctgccttcccggagcttacattgagtgcggaggacagaccagggactagccagcagacagtcccatgtgtcagggtctggtgtttgcagagggtgtttgcaggggtagagcatgacaggaagtggctgttttggataagacgatcaggaaaggtacccgtctgcggaagtgatactgggtctggagtgaagcggttggaagaaaactgcacctctctggaggaagacagtgccaggcacagctgaaaatccggggctagagctactgggaggaacaggaggagcagctgggaaactgggtggccggagcagacggggagggtgagcagggagggtaaagataagcaagcaaggggctggggctgtcaccgaggtggggtgcctcggagggtgcaggagcagagtcaggatctgacttaggtttgataggctcctctggctgtcctgcgatttatcagggacccaggttgcgagcaggccgaccactcaagaggcgtctacatcaatgcagtcaaaggctatgctgacttggaccagatggatggcggaagagccatgacagtggtccggggagagaccacaagtttgcaggcagggtgctagtgaaaaagaggcgtctactgaaagctgtccaggagaaatcagactaggttagccatgaatattttctctaattctgtcttctatttttctcctccagttatatgtaagggtcttactgcaaattgtcagtctatcgttctctgagccaaagtggaaaccaataaaagtgttgggagctgcctacattctagaactgaccgtacagggaaagaggccacacttttccacgcatatttcctggagtcctggaatggcttcttcacatatttctccacccccattagacaactcagtcactaggcaagaggatggatcttggagtctgacagacaggcatgggttcaatttctctccaacgattatttcatctcggtgcgacctcaggcatctttgctttcccagactttgttttctcattagcaaaacagacctaataaaaggactcatttcataggttttttatgaggattaattgagataaaccagataatacgcttaacaccgtggtacttgcaatgaagaaaatggtgaatggtacatacatggtaagtggtcaatacattttagtcattctattaacaagttaataatcctctccatgccttgatttccttattggtagaatggggataataaaacccccttctgggtagttgggagaagtcaagcattaataccagtgaagcacttcaaatggtgctttgcatacagcgagtgctcaataaatgttaaattcttaaaatcatcaccacgattctgaccttatggactttgaagggcagatgttgtgtctcattgctttcgtgtccacaagacctggcacatagacgatgctcaataaatattatttgaaggagtgaatgatggtgacatggttcttaggagttaaaatgagaaaacccaaggagccgaaagcatgtctctacggggaaaggttagagagcactgactcaaaccatcgtctccaattatgcagttttaatgaggaagcaagcccaaccttgaacattatttaagccagagttatcccaataagcattttcctaccatgagtggtagattaagtagcattgagtcatgtagtgaaagtaatgtcccttcttcataccatttcaatgcctctggtaagtcaagagaaagtctttgataatagcctatttttaacacctctcacccttgtttgtcagaaagagcagacctcagattcagagactttagcaagcaaagatatccagtaaagaaatgaaataatggccgggcacagtggctcacgcctgtaatcccagcactttgggagtcctaggcaggcggatcacgaggttgggagttcgagaccagcctgaccaacatggcgaaaccccgtctctactaaaaatacagaaaaaaaaaaaattagccgggcgtggtggtggcacatgcctgtaaacccagctactcaggaggctgaagcaggagaattgcttgaacccgggaggcggaggttgcagtgagagccgagattatgccactgcactccagcctgggcaatggagcaagaatccatcaaaaaaaaaaaaaaaaagaaagaaagaaatgaaataataatctcagggcagggcatggtggctcacgcctgtaatcctagcactatgggaagccgaggtggcagatcacctgaggtcaggggtttgagaccagcctggccaagatgatgaaaccccatctctactaaaaatacaaaaattagccaggcgtgatggggcatttctgtaatcccagctactccggaagctgagccaggagaatcgcttgaacccaggaggcggagattgaagtgagccgagatctcgccactgcactccagcctgggcaacagagtgaaactccgtctcaaaaaaaaagaaataataatcttagacttttgttgtctgattaccatcaatgtatggcaaatgatatgggtttttcattgactatgacataaatttttgttttaaaataaaattacggcaagaaaaaagaaggaatggttttaaagaaatattaaaaaatcaattgtgtgtgtgtgtggtgtgtttgtgtgttttgtgtgtgtgtgtgtatgtaggggaagatgttgcacaagctgtgaagagggggtagaatgatgtgaggacactgcaatgccagggcagggcaaggtgcagaagaagctgtgagtaagggctgtcaagaaacccccagaagatagaggctttcattaaaacttccaaaaactttggaaatctgaaggaatctcctctcccaggatatcagcgggaagctcaggaaagtctttactcacccccaaaattttgcaaatatggagggaatgggaatgatttcctggttttgcatctagaatagaggagtggttctcaacctttatttggtatactcatcacttggagaagttgctaaaatgcaaatttgcagattccagacctacagcctagagattctgattccataggaggggaatgaggcccatgaatctgggaatctgtacattagatatccattaatccatttgaattacaggataacaggaaaaagtacataaaatttatataagttccctttttttatactctttctctctcctctctctctctctttctctctcctctctctctctctttccctctctctttctccctctctctcttctctctctcctctctctctctctcccctacccccaaaatgccaaagcacttatattttaaaagttgtttcaaagttgtttgaggggtccattttcacttgtggcttttagtgaacagaaaaaaatataagaaggctctctattgtgttacagcgaggaaatgcatgcatttacacatttgtctacctggtctcagcatgaaacagagcccagaaaagtcttcaattaagaaggagaaagacaagcaatccagaaaataatttaagagggctttgtctgcttgggagccagctggcaacctgggttccagatcagtgagacaagaaagaagcaaaagggatctctcagacttgattctttatttcttacaccctacaattctcaagactctatagaatgagggcagaaaacctgggttgtattttttggaatctcctctactttcttgttatctgtttcatattttttcatactttttcaatgacttctcttcttttttattcttccttcatttcctttgttctttcctgatttcctttcctgaatcagacttccaagccctttctatgtagtaccggtgatccatgggtgaatgtgataaaaacgatgatggtgctaatgatgaacatgacactaactgtcatcgccttaatggttaccatttcttgacccatataacaacgaagccaaaaggactaagcttgtacctaacatttaccaagcactggctacattcaggttgtttatatacaatctctccccgagacatcctgtaagctggttatgattattggccaattgaatagatacggaaacctaagttttggaaatttcaaggagcttgactaagatgatgacaagcttttagataggatactgaagcccaggcccacctatcagagtccaagctctcagacactatgctttgttgcttctcatagtatttcatgcttaacagcacagactcacataaataaacttccacaatatagtatagatacatggaggctaaggccatgaactgaaatttagtgtttccccaggttgaagtaagtcaattgtgttgtagaaaaaaaaaaaaaagatcatccctacttatttaaatccccaaacaccatctttaaaacttgagcctatgaagaaaaagaataaagacttttgaaatctcttatgctatccatgatggcatttttgtaaatccattcctgtttcactaaacaaaagtagaaaaaaatcatgaaaacccccaacacagtccatctggggcgtctcagtaagaatcgtgctcacccactccacagcatctttgaggatgtggccttaagtcagacgctgctcatctgttcctgataaatctcttgtaggctccaggactcttcctggccatcaaaaaatatggaacgcatgcaacgacactgccctcttatttattttagcaaatgaaaatctgccctcacaggtttatggtcaagatgtctaaaagatgtcttgtatttgtatttaagagtcaccttaacagtaggtgactcttaaatgagtactccaaataataggataagaaaggtgatcatgaaactcaagggatcctatctgagagggagaatgttgtctacaccagaaatcatgatagactctgtctggcaaaaaaaaaaaaaaaaatcaattgtttttagttattattggtgatgtttttttttaacatttttgtttatttatttcctttttagtgggtcacattttaaaacaacccattgtgttaatacaaagtttggcaaactgccttgccatctgatttgaggttaatctaataagaaatggaatgaaatgatcatcctgttttattgtctttaacattaatgttttctttgttagtattggatgggaagtcagtcagatggaatagaagaaagaactgttaaaaaaataaaatgagcttatttcacttgatcaatcaatttcagatataaaataattaagctttacaaatagttaaggactctttgaacaaccagcttaaaatctctgtgcctcactcctgtaaaataggcataaggagagttcttacttccatgcactattatgagaagttaaaaaggtgatacttattacatactcagaacaacgcttggcgcataataagaattcaacaaattttagttattatttcctttctcagtctctccctagagacaggcactattaaaaatctagtgtgcgtatcttccattatttatagttttacatgcatgtatatgttgttagaagcattattattctttcgtatatgtttttaaaagattgtgtaaatagtttcacactatattttgtaattttttttcctttttttttaactttatgtttggactctaaccaagtaaatagataggtagaaaaaagaaaaagagagatgataggttttaatatatatacatactaattatatatatataactaatttctctttatgtgctttgtaatattccatcataagaatgttcatttgtattcatttatcggttcctctgttaatagacatttagcatgttttaaatttttcaccattgcacaaaatcctgtattgaatattggtggtaatttttacaatcttcacataagtaatttatgtggagaagaacagttatgaaaaatttactggatgtagtaagaaaatcatttgggaaaaaaataaacattattgaaacagctaatattttataatttgaatattttttgtaacttcactgagatgtctacccctctaatgaaaaatgtctacccctctaaccaaagatgtctacccctctaaccaaaacatttgcacatagtaggcacttgaaaaatgcctgcttggcttaagtacgctgaacgtaaataaaatatatcaataatcccaataataagtgtgttaagaaaactgagtagctgccttggggtggggtggggtggggaacagggagaagtaaaaagaaaagcatgaacaacagaaaagaaatcacacttgtcctcagtgtttgtaatagatcaagcttcagagctggccagctacggctttagagatgccgagctcctggagtgttacaggtgtgtggatggggtcgggtcagggaaggaagagccccccggattttgtgttacaagatgaattgttaacaacagtcaatcccgcaatttaacactttaagcagttaaacttaagttaatgcagtttagcaaacatatattgaagctcactggtaggtccagggggtagaaataaataagacagaactccaatgtttagaaggtccatgtggtacaatatgcttttcctaaccaagaccaacatcatccttataacagggatgtgtgtgtgtgtgtgttgggtctattacctctgcgtattgagaacactgtgtgtatattttacccagcatgacttggttacactgtatgtatattttgattgtgtatttctgctgtaggtctcttttattgtgtgcgtgagttgtgaatacatgtatattatgtgtgttgtgattgaacatgtgtgatgtatgttgtgggtattagtgtgtgtgttgtggcaggggaagagagcatgaaaagcttttctgatgcatgattttgtgtggattatgtatattgtgggtattattgtgtgtgttgtagggggagagagtgtgaaagcttttctgatgcatgattttgtgtggattatgtatgttgtgggtattagtgtgtgttgtggggggagagagtgtgaaagcttttctgatgcatgattttgtgtggattatgtatgttgtgggtattagtgtgtgttgtggggggagagagtgtgaaagcttttctgatgtatgattttgtgtggattatgtatgttgtgggtatcagtgtgtgttgtggggggagagagtgtgaaagcttttctgatgcatgattttgtgtggattatgtatgttgtgggtattagtgtgtgtgttgtaggagaagagagtgtgaaagcttttctgatgtatgattttgtgtggattatgtatgttgtgggtattagtgtgtgttgtggggagagagagtgtgaaagcttttctgatgcatgattttgtgtggattatgtatgttgtgggtattagtgtgtgttgtggggggagagaatgtgaaagcttttctgatgcatgattttgtgtggattatgtatgttgtaggtattagtgtgtgtgttgggggcagagagtgtgaaaagcttttctgatgcatgattttgtgtggattatgtatgttgtgggtattagtgtgtgttgtggggaaagagtgtgaaaagcttttctggtgcatgattttgcgtttgtggtggacctggcatgttcatgtgttcttgccaactatgctgctaatggaatcactgcaaagcccttcaggattttccctgtgaacatgaagccgacgtcacagtgtattttcctgggggttcccctgtggcactgtaccctgacctcctggtcatggcttggttagaggaaaacaaaaccactgttacacaggatgtcccctgctcaggaaaatttgctctcaatgggaaatgtataagagacagatagtactggaagctccacaccctattgtaatgtctatttcctggcctctcttcctctccatgccacatgttctatcgtgtcagggattcatcttaggaattgtgggaacaattcatttgcagtacctggaacacagtcagtgggttgaatgcatgaatgtatgaatgaatgaatgaacaaggggttctccaaggttccaggcctttggaatatttagataccccagttatttatactcacagagctgactgtagtaggatcttagtaaatgtcatatagataaaccgatgcatgcacatggcactcgtgaacatttgcttatctcagaagcaggctagcaatcgtaagaaaacagttcttcagtggggcttttattcttcctctgtggatcccataggagccccttgtctcctgtccctttggtttaattattgttccttaagatcagcagggcagcccttctgtttactgtcaaactgcagccacaaatggagagaaagaatgaaggggaaaaaaatcttcataatccaggtacaggaatttcctcaaagatttttttttctttaaaagaggtgaaaggaaggtggaaaagttggggaaatgagtttccaaacttgccaaacacataaaccaacagaattgtgttgctgcctccataaatgtttaataagttttatcatcttgtgactaaggttaaacaaatgtgagtcctttgaggaattatttactggaagcaaagttatagcatcaacatctgtgtttccaatcacttagatgaggaatagatcaaataaatcatgagtaagttccacaaaataacttctgtattatcatctcaggagaagaataatgtaagcagctcttttaggtgccctctcgattggaatttacaggtttttttcttaggcttctctttttttattcatttcattatctccaaataataagtcttcactgctttgtggaaagttaccataaaaacatccacaatagaaggactttgaaatttctctctgggaatctggctatttcagccaacattctcatttgggaatgggctaacatttccaatatataacatccatataatttaacctcataaatttattttttttcacagtgatgtaatggggagactgacctggagtttataaatgttccctgctcactgcattcccccgggcaacataacattctagacagtgttttatgtgccctgattaaaatataacgtattcttgcatttcctgtggactgacctgttagtactcttagcagaacatttaaggaatacagagatgttttcaaacgtgtaacaatgcactgtgtgaggtttgtttttgttgttgttattaaatcatgatctcattttcattttagatcacagtcccctgggcgcccctccacaagaaaagttctgtgctttggtttgacttttgaatctgccagtgcactctgacaaataaaaataagcaggaacgcttgtttgtaactgcaattggaattcttaggcacatactttaagctgctttcctgaagtggagggaaggatttggaaaagttaatggggagtcccccaagataaaacagtagcaatggaaacttataaccttccttattgaaagaaaaaaataataaatgaagacaaggggaagggcttcctatagtttttgcaatcatgaaaatgacacttgtgacacatagtacactgagcaaaccaatttgtggattgagatgttttaattttctatgcgagaaacacataacaaaagtaaaaggccacccttgccttccggaggagcaaagggaagtttgtggggtgaggatgtgagctggaaaccttgctgggctgaagctgatgctgccatgtagcttttccagggtacaaatctcattccaagaataacacaaaagaggcttggaaactgcttggaggaagaagggatggatagatcaaacaaattagtgaaagataagttcccagaaaggagtatgtgtatttgagagtctgccttttattcatttaacagatatttattaatttacattgttttccggcccctgtgctgtgtatcagggcttatcaggataaacaaggcacagcctctgctttcagaggttagcaatggagtgcccagaataacgtccggaagaaggcacccagtgaggtctcaggaaatgttagttgaaagaatgaatgggtgaattaatggaaaaatagacgggtgaatgaatggatgaatggatgaatggatagatggattgatggatggatggatgaatggatggataaacggatggatggatggatggatgagtagatggatggatggatggatgagtgaatgaatggacggatggatggatggatggatgaataaatgaatgcataaagatgatctgtggctccctaggaattcaagctcatgtctatatgtttgtttctggatctaattgttgatttctgcccggattttatcacaggtgggccctgacattttcattagcaatggttcccttgatttcccttcagacgaatccttcctgaacccaggtgccctttatcctgcacattagcccctagtcagctcttacaagccataatgtgccgtgaagttctccagatttttccctggttggccactctgagtgtttttcactgctcaccacgacctctaatcaaatcagcttggtttccctgtgtctccttccctctgttttgctcctggaaactgtgataaccagatgcattaacatttccgagagtccaccacatgccaggctctgtcccatgtacattacagtgcacttgaggctcatttagcctccctttcaattgagcaggtagactattattcctgttttccagatatgcaaactgaggcacagagctgtgaagtaattagttcagatggaagacacatagtggagccaggattgaagctcaggtgtgtttcactctaaagccacaacaagtacctaacctcagcacctctagaggtcaaacttttttatcttgatgaatcctgtttttgcctgtgatacattttccagcatctcagttcctcagcagagctccagcttcacagctacagatacagagacccaaggaatggagttggggtaagctccatctttgatgttttttaacctcgctcctcattcagaatctctacatggggtggctgtagtaaccacctaccatcatcgtccatctggcttagccactagcagaaaagaacatctctctcaggacctccagcaaatattctggggttgaccttaacctacataggtttccacgaccctccctgaaccaatcactttctctggctctgtgcatccagaatgatttgccaaagcaaaatcaaagtggcattaccaaaaaagggaggaatgcatgcagagccagcagagtccatagctgtccactacattctctatagggttgcaaccaagtgctttgaactcaggcaaactgaggttccaatctaggttatttattttttctttcctttttttttttttttttttgagacatagtctcgctctgtcgcccaggctggagtgcagtggtgcaatcttggctcactgcaacctctgcctttcaggttcaagcgattctcctgcctcagcctcctgagtagctgggactacaggcatacgcctccatacctggctaatttttgtattttttttttttttagtagagacagggttttgccatgttggccaggctggtcttgatctcctgacctcaggtaatccacccacctcggcctcccaaagtgctaggattaaaggtgtgagccattgtgcccggccaaggttatttactttctatctgatcgtagacaagttatttaaccttctaagccccactttcttaattaaaaatagtgtttttaatgcatgctaagtacatagtaagttcttaataaatgttaatgtggtgtttgtagacaacagtatgttgaagactactggaatagcacatagatgtctttggagaaagagatatattcttttgaggtctgcatttatgctttggggcacacagtttaataaaaaggtaatataaaatggaagtggggtaaaatatgtctcccagaatgagccaacaggattgaaagaaccactttccaagtctagatcactgtagcatctttttgcttaaggccgaaagttcttctcaactttcctttcaggtttttatttatttatttatttatttatttatttatttatttatttattaggcaaaatgggaattgagaagcctgaaatgatgaagatgctcatgattttaaaaagtttttgtatgtcaggaatgaaagatgtggtgaggttgaacaggaggaaaaaaatgactgtatcccagtcagcctgggtagtatcacttcctgctttcctggggtaaaaagcctggaggaatatgggcattcggttgttgagaaagagtttgtctgacttctcttgctgtatttgggattgttcagagactaactggttggattgcaatttgctttcttgtggaaaaactgatctagcaacatatattgtgcgtttgagctttagagaagccttttctcttgtagtttattctcttgcatagtggtgtttctaggctgctgacatatgcgaaggaaacattgtattgatgtgtgcatgtgacagtctacctgcaacatgcatgtgctcgtggctgaatcatttgtgcatccaaagctgaggtccctggctgctgttgatttagtccaatgcatatgtaatactctgtggaaaacattcctggttagtagctcctcactactgtgttatacaagctgctggcaaaggtaattatgcttaataggagccacctttgatttaaagctgcagaggtgagtaattaaattgagctcgctcaagcacgagggggtggcatgcaacctttgtttggggacattcattgggagcggctgggatctgttacaaaggcaatgtttcttgggctcatatttgtcacccagattgtcttagaaagacatcagtgcacctgggagagatgcagcaaaggcatagtgcaggcatctctttcttcgtcctgtcccctcaaatatcaccaaaggagaactcgcctcccagcttcatctgccctggttcctgtgctcatcttgccccgggggggggttcagcactgtcctgctctctggtttctcgatgctcatctctacagatgatcacaactgatcaccaatagtgatcagtcttgccacgtggactggcagtcctgagatttctaatctgggtctgctcggacatcaacagcaacaacaaaagcataccagtcccttaatcctttaatgattgaatatgagacgaattcgtgtttgtaagatttcatttcaatcccatgggtggctattattgcatctcaaagatgatctatttgtatacatttctatattttcttttcagcaaacctaacctgataaaagaaaaaaaaaatgcctgggctgtcctctccccagccctaccctctagagtttctgaatggtaacacccaagcaagccgggttctgttgggcaaagagcctgttccaggcgatgccacctagaactggggtgacatacttgctaggaaagaacagcaactccaactaaatctttgtggcttccaaaggattcccaagctccaggcagagggttttgctctgtgataactgcaaagtgggttcataaaatccagaggaatcctaggaaaatctctttgcctaaactcccctgcttttaggataaacagatggccttacatcttcctactcaaagtatggcctgcaggccaacagcctcagcatctcctaggagctcattagaaatgcagattctcatgccccaccccagacctgcttcatcagaatctgcattttcagaggatgctcagggggggattcgtgagcacgttgagatttttagaagagttagcctaccctgaatggttgactcctgcctcctttctgacttgaaatcctcatcatttccttgcctgaactgtggtttctttctgtccttattccatgcccagctgtgccttcttctttttttggggggacagagtcttgctctgtcacccaggctggcatgcaatggcgtgatcttggctcactgcagcctctgtctcccaggttcaagcgattctcctgcctcagcctcctgactagctgggattaaaggcacctgccaccacacctggctgatttttgtattttcagtagagaccgggtttcgccatgttggccaggctggtctcgaattcctgacctcaagtgatccacccgccttggttcccaaagtgctgggattacaggtatgagccactgcacctggccaaagctctgccctcttcttggtctagttaatgccttcacatggttcatatattagcccaagggttacttgctcagggaaaccttgcctcagcctttagattaggttaaatccaccctcgccagtacaggcctgaaagcaccatatacctcactgccttgctcttttcagggttacaattctatgattcttggtttagttaatttctgtctatcgcctctgcacacagttccatgagggcaggaaccatgtccagttttatgactcccacctgctgggaccccaccatagtgtccagtacatgtagaagctcaataaatatttgttcagtgaacagatgcgtgctctcaggacatataattaggaatattgtaggcgtattgctggctacttagtttatctcttcaggaatgttcaaaacatttctagaactgttttctgtttattcaattccaggtgatgagaaaatcaactcaaccgaactactatttttaagcactttccacacattcagcattataccacttaatcctcacaacattttataaattttataaatgaataaactgaaacttacagcagtgatttcagactagcaaaatgatggcagagctgaaaaccacgttctactcttcactgccacattccactcttcactgccacattccaagacccatgagtctgaggcctcatgctctcccttgggttggaatcagagtggttctccaagatgcacagagttcccgattcacctccttaacacagatctttattaagcacaccacctgggtgccaagcactgttctgtagcagcagtaatgagtaagatccatcaggaccctgctctcaggggacagaagcaacatatatacttaagatgccatgtggttaaaaaggggctaagaagaaaaacaaagggtggcaaagggagggaaggtgagggaagggggctataaaccatagagcctttgcctccttcatttttgtatctgagcacttggctcaagggccagtgtgcgataggtctcctcagttagcatcggttgatgactgactgacagatggaatccaacatttccaaagtgggctaagcaccagctggtgtcgtatgtgaccataaaactgagcagagcaaacggccagtctagagattgggatttcctaccctgttgcccagattttcctccctctatcagccactggtttgtgactggaatcatcagaatcgcctctagagctttcaaaaaaaagtcatgtgctcagcttttccttgggcaaactgggatttctgggggtggaaaaccagcatgtgtgtttttaaaaaatcctacagttaagtctgatgtgctcaaatggttgagatgctgtataccccaaccatgtgaaataataacaccatctagctttcactgagtgcctactgtgtgccaagccacatactcagtggttaaccaaccccactaagagagaagaagatggtgacgatgatgatggtaatgaaaacaacagctaatatttattgagtaatgttgtttgtgcctggtgttatgctaaacacttatgatgtccaaatagttcatcttcgcagacgtccaatgagtctttttctgtctcactcaccattatagacatttcagagaaggttcaagtaagtatcagatatatgtttcaagcaggggttgacaaactgtgacctgtgagctaaacgccacctgtttttgtatgacctatgggttagaatggtttttacattttttaatgattgggaggaaatgtgaaaattagttttcttaggttatataagtacctatataatatcttaaattttgtctcttggcctgcaaagctcaaatttactatttggtcctttattggaaaagtttgctggcttctgccctagtgtatttttttccaacttgttgtatgtgtaggacagtcatatgagtgattgttttaggtggtagaagcatgaatttttaaaataattatggtttcatttgctgtgtaatagaaggggaaagtaaaactaatatattaaaactgatttcatggatgttactgctcaatccaatgtaaagaaaaaaatgaatctttttgaaatcaatttttaaaaaataataatacaggcagtatggagataaaacagaaatcatgcaagttatagaaatgggataaacactgttataggatcagaaagtgggatgaatagggaaaagtcaaaataatggaaacaatttcacctggatgagaaagataggagatgagatgacggaagctttttgcatttttaatattctgtgattctcagtttcttagaacccttgtttttcaggactttttgatctcttgaggtctcttccagcgctctgattccatgaaaagtttcctcgggagatactgacacaagctgggggatgtccagggttcgttatagctcaaggcacagtcttcctgtgtttttccttctgctgacttagaaagacagatgagcaaacctcagatggattcagaggtttggtggggaaatctgagaggctctctagttcagccaggagtggaagagggggacagccatctgataatgactgttgctattttaagacacagatagcagagatgaggagtagcgtgatgaaaactcacattaaaacaaccaagagaggcacaacaggaactctatgaaccccagagagacccggtctgggtttacaatgacaatgttgtgtgtgcgttcatgtgcgtgtgtgtgtgtgtgtgtgtgtgtgtgtgtgtgtgtgtgtgtgtgtgtgtttgggagggggtgctgatatttttttaaatgcagatggttttgttctctgtagttgaagcttcagttcagcagctctgagacaaacaggaaagcctgtgttattctctacaggaacacatcaaaggtagtttctggcaacagtcaaaatgtatatcaaggaaggagaaaggattcatgacctgtttgaacaactagtgttaaaaacacattcgagaagaaataatgctaggtagaggatgaaaggaaaataggagaaaggaagaccccttgcttcactcagacctaaagatgattgtttctcaccattgctagctttttcaagaataaggaagcgaaaaaatcacctgtctcatttatcatctgacaggggagctaaactctgctggatgaaactttttcttttgccccagactaaataaagccccacctcgtcttctgtttcattttgaaagaaaagaggtaaaacatgcacaactaaaacacttgtttaaaagtgtgtgacatttcaggaaggtttaacgttacgtatgtcttccctattgagtttcataaacagagtatcattgtttgatagtggcatagctgtggttttgagaaggcttgtctagaacggagttcctgagctgcttggatgatatttcactgctttgatggagaacggactaaagaacatcattgtgacctttttatcaaggcttaaaggaagtataaaaagaaaacggaagttgtcaacactcaccaggctctattgtgaggcacacaaccaacccagggaggaaaatctaaggttgcttttgtcaccttaactcacatcacttcattgtagtacaagtgagagccggaacttattggacacttactctgtgccacacaggctttgggtgaatttttgcattttaattctcaccccagtaaagagacataatggtatccatgttagaaatgacaaagaggcacacagtgaagtcaggtgactcggccaagcttctgcagctgcttagaggccaggctgatctacctagccaggggtacctgacttccaagcccgtgctgtcgacccttctggtttaactctgagtaaatttcatactttgtggagcgtccatcagccaatcacaatctaaaaataatacaaaatgaaagaaactgtcatacattatctttttttcatcttcctaacaaataagctggcatgattattctttccattaccctgaaaaataaaccaaggctcaaggagaggtcatggtctgccccaaaccacagcctccattctctggcttgaaatcttatgcttttacccaccttttgatgttacctcttaagtgatgttgccagaattagcaataaaataaatttataaaaaagaaaataaatatttttatttataaaaaataaatttataaaaaagaacaggatgcacagttaaatttgaatttcagataatataaaagaatgtttagtataaggatgtccagtacagtatttgggacctacgggcaagctttaaagaacataagttttatcacattctccaggtacgacgtgtgtattaataaatcaatagaagtttatctgtgagcagttatctcagttttttaattcctaagtcttcatgttctgaagaaatggccatcaccttgcattcccagggcctattgattatgaggcttcataaaccttaggacttgagagaacagctgggattccttcccagttgctaaccaatgacttcataatgtaatggacagctctaaattgtgcttctacgttgtagacataataagagacacactaaaggacaaatacattatctaataaagctgcctcgagcttaagagataacaaaatgtcaaaactaaattctttttctaagcacttccagtatgaaatttagttcaccgtccaggtactgtccttcattgtggggagaaacatcctgcctgtctacctggggttctattttatttcatcagcctcctgtttttctccagggatggtgtgtgtgtgtgtgtgtgtgtgtgtgtgtgtgtgtgtgtgaaattttttcctaaatattaagtcagtgcaccttcctcgcaagcgctggacagctcaggatcttattttggaagctcgaggtatgagcaggcctgagaaaattgtggcccttctttttactccttccctctgtgaacttttgagaagattccttagtgatcggcttacacgctttcaaactggcacgcctgtaatctggtaaaatgtgtcagccctatggagaaataagccttccagaagagtttcttcattgttgaggtaattgtctcctctctgacaggcacattcatcagtggcttaatggtcaatcactagttggcaggcagagtgttttcattcttccctatccactacattaggcatacttaatcaaaatgtctccgggtaatggctgtgaagagttcatgactgactgatccgttgtctgtgctgatagaaaattaacagctcagtgctggaaagatgcgagcccacagataaacaaattgtacattaatatttcatcttggggacctgggatgtgctgtccatagcaaaatatttcctggctgcacaagcaattctttctttccttctctttccttcttttttttctttttctttttttttttaattatttctttccgtaagctgtgcacactcataccacatggacagtatgcatcctgttctagaagcttcagtgtctgtggaaagttcaggggagttcatattcgatgccctgttttcatcactgccaaatgaaagcaggcgaaaccctatagaggagttgttttgttctttctttttctagtataatatctgtgggctgactgttgcctgagcatggaacacgcacccactccccccctccaattaaatacctgccccaactttaaacatatttcatacagaatatttaagggtttctggatgaaatacaaatttcatccagaaatacaaatttcatccagaaatacaaataggaaaacacacattgctcagtcctacttattttagctgtaattcattgtgttggatgattttgcagagtattctgatagtgaagacaaactgattccctagtgaagctgaaatcggtcaagcttcctgatggccaagacgtaagatgatacagcagttgaccatgtgcgaaagaccagaagggtcagagtttgacttgccttgaccccatgcaggcgttgccccgccacctcttcctgtctttttaattttatacccagaagaacaaaaacagagaaaaggcatttacgcttagcagtccagacctgccgggaaaagcataaaacaaggtgtataaatgctggaagaggaagccacaccatcctgctgcttatgagctcagggaagttctttttaaatggtgtcctaggtgcacacaaaagaaatgtgtgggcgtccgtgtgacatcacatgccataaaagacatcaagatgctaccaaaagtcagaccctcaggtttaatctgagtggttcaatataataataaaaataataatagccaactttcagtgtttactataagataggcaatatgggctgtacatgaatcttctgatttagtggaggtagataccatcattattcccattttacagatgagcaaactaagagagacaggaggaaattcatctaagaccaaacagccagtaagtgatataatagaatcgtgggagtcatcctgaactttgaacctcttcccttaactgcactacatataagaagccaggtttaagccgggcctggtggctcacacttgtaatcccagcactttgggaggccgaggccagaggatcagtgaggtcaggagttcgagaccagcctgggcaacacggtgaaaccctgtctctactaaaaatacaaaaaaaattagccaggtgtggtggtgcacacctgtacctagctacttgggaggctgagccaggagaatcgcttgaacctgggaggcagagattgccgtgagccaagatcacaccgtgcactccagcctgggcaacagagagagactctgtctcaaaagtaaataaataaataaataaacaaataagccaggtttgagctgaactatttagaaatataaaatgttgaagctggagaaaacgtgtagatgtcctgccatctgaactcttcctgttccagaggagaaatggtggcctagaggaatgggaggtgaagggtctaaggtcttaccactgctgtccccaggcagtagacacattggttttattaacaggaaattctttggagattctctgtaaatcctgcatgcagcgtgtcctgtgtcatgtggtgatgagaagctgaataaattcacacttggatcattctcgatctgtcctaggcaaggccctggagaggtactcggtgttaaaatttctggagtgactgtgacatcttgaagtataaagtagaacaaacctttgtgtatatagcccctctctccaagtactggctctttctggttattctctggctagattttctttcctctagctgatgtgtttggtgacctcactttttcttctctgttttgagaaatctatgaaatttaagataagataagcccattgggttaatagcatttcacctgcctttcctgtatactcaagaaataatcccaagagaagaatcttagctttaaaggcatcaagtttaacacagagcagggtgagatggaatgtatttaatagttagatgatccttcattcttttcttttttgtgacacacacacgtacatgtgtgcactcaaaatgcttaacttataaccagttccattgccacttcattcacttacgagcctaaagtttggaagtttgctcctattgaaagaaaagttgtaagatgttcaacattataaaaagtgcatgagttgatctgttcccagacagactcacagaattttacttaacatatattgttgcaaaaatgtttgcatccctactgaaaaatcattagtgtcactattgcaagagtagttattaaacagttaagaaaaaaagtgatattttccctaacgttaagtattcatgcctgaaaagagactgagaaatagatacagatttttatagctattctggaagaagtctccatgtgcttttgaagaatttgcaataggagcacaggctcatgtatccttagatgccttgcatggaagcacatgaccaagataaactgaacactagccaatagggagtggtgaggaccatggagtgctgcaagccccagtcccttttaatgtgcaccacggctactcaactccagtctgtagtcaccatgcaggaatccatcatctatgttgccagatcttttggtttctcaatggattcacaaacctacatttcaatttcctaagcagcacaagttaagtaaatcacacgtggtacctgaattcaatgtaaactgccattttataaactcagatttagagatacatgtagtccttcattcttcattctttcacatcattttctttggtacagatctaaaatagcatcattctaatattaatctgtcatgttgggtggtggtggggtagggtgctatggtttattttgtttggggtcaaacatgaataaaaaataaaaataggacttttctgagttaattgagtaggagttgggagagttagaggggaaaactgaatatcagtataaatatttgagcacctacaatgtgcaagttctggaaatccatgagtgaacaaagctgatgatgccctcatgacacttgtaaatttctcaataattctttaattgccattgtgactggtgctgcaagagtaaaggctgctactgtgagggtgtctgacagccctagcctggggtggcaagaaaggcttccctgaggaggtggcattgaacttgatacttgaaggcttagcaggagttgaccaggctgaagtggcctggtggagtaaggagcttctggccaagaaggccttgggtgcagaagtcctgaggttggagacagcaggtgcatggacagaggaaggttggcacgatcggctccagtgagaaagagaaagatggtaaggaaggaggttcagaaatcagatggaccaaacacatgaaaatgtttggtcattttaaaaagatgacttgcaatatggcaactgggccataaagagttaacaagaggagtatggcatgagtataggcctttcaaagtgaaagacaggaagaagcacaaaatacgtgttggataaaataatttcttggtgatgacattagcatggaatagttaccatcctagagaaggtgctagaagatacaggggaatgataagagtcatccaagaaagaaatgtgtgtttgtgtgtgtgtgtgtgtgagtatgtgtgtatactcgtgtgtgtatgtatgtatactcatgcgtgtatgtatgtatatgcgtgtgtggtgtgtgtgtatgtatgtatactcgtgtgtgtgtatgtatattcgtgtgtgtgtgtgtgtgtgtttgtatttctgacatatccatatatccagttgagtatttgcagagtgatgtgagcatgacatggttaatgattaaaatccaaattaggtttcatcaggaaaattaaaataatttaaaaaataataatacaacacagcaaatggtctggctgtgtttcctacttttattcataatactaatttatatcattataaattatgtgtaagggtgtctaccttgtcaagcctatgtttgtaaagaagaaagcattttgtatctcacaccaagaaaccaattccactgaattgtatgtgagttaatattcaaggcaaaaaagaccaatttaaatcaatacataattaaccttgatattagaattgagaatgaaagcccagtttagagtgttgagcatgattttcttaatgatatgaacagtgtgtttagtctttatgaagaaaaaaataaagggaagaaacactggatggaaagaggagagaagtaggtaaaggcatttcagaaatatggttaattgggtaattggggattgggtgtcacttgaacttaagcctgtggttaattcatggcttattcttcaggaatgacattggcagagcagttattggaataatgaattgctcacttgtcctgggcaaatagaaaattcccctggttgaataaaacagtgggaggaggcatttgataggcttataatggcttaagagcctgggttagggttcttcccctgacagtcagaaaagagaactttgggggattggatattttcagcaaaggggcaaaattaagaaaggattataatcaccttttttttttttttacgggaattgacattgatacttaaagcattttcaaaatgaacgtcaaaaacagagttaagcagcagaatattaagtcaaggtagggggctgatataataaggagtttgaggaattttagaggaaaagtagtcgatataaaggccaacttagtcaagtgtcaattattcccgttttaaaaatagagtagtgtatacccttattcatggggaatacattccaagacctccagtagatgcctgaaacctcagatcataccaagtcttatacatattatgtttttcctatacaaatatacctgtgctaaagcttaacttataaattaagcacagtaagagattaacaacaataaaaaatagaacaattataataatatactctagtagaagttatttgaatgttgtctttctcctctctctctctctctctctctctctctctctctctctctctctctctctcaaaatatcttgtactggctgggcatggtggctcacacctataacaccaacaatttgggaggccaaagtaggaggattgcttgagcccaggagttcaagactagcctgaaaaaatagtgagaccaatcgctacaaaaaatatatatatatacaaaaaattagctgggcatggtggcatgtgcctgtgatcccagctactcaggaggctgaggctggagaatcggttgaatcagggaggttgaggctgcagtgagccgtgatcctgccactgtactccagcctgggtgataaaatgagaccctacctcaaaaaaattcacaacaaaacaaaaaatatacaagcaatatcctgtacagtgctcactcttctttttcttgtgatgatgaaaaatgataaaccgtgtgtgcaaagagatgacgtgatgaagcgggacagctcaggatttcatcacactactctgaaaggcacataatttaaaacttatgaattgtttatttctggaattttctatttaatatttttgaaccatagttgaccacaggtaactgaaaccacagaaagcaaaaccacagataagtagggactactgtaaaaagagaaatagttccataaactttcaatgttaacttttttagccccaaagtttagaagattcagaggagaaagattttcccagtcaaaaagcttctgcccaaactcagacttttcagatatcttgttgaaggcaaatttccatgttatttcaatggcaaatggcagacccttggaccaaccaccaaagatactcaattatttccattaatgcagtgaagggactagaaattcattacccaaaattccccccaaaaaaagacctacattgggaactctgaggattttgtttgtttgtttgatttgtttctaatatggcttcgtggcatcttgtgtttcggggatgatgtaaactatatcataatcactatcattgtcattgttgattctcttagtcttttagagtggacaaaaggctctcgtccatgggtctaccctccccttctcacctaccattttctcctcatcctcgtatgtaaatactgagaacctactctaaccacaaagccagtcattcaggacccattgcctcaggctggatgctgcagtcttttggatggaacccaggaatctggattcctaactggaaccctggaggatggttacacacgtcgaagtttgagaacatccctctattccacccaccacattgcatcacatggcagaatgagaaaagattgatctttgaacaattccccattttgattggatcatcaaaatcctatctgcacaatcctccatgtctaaacacacactcctaaaggaagcaaagcaaaacaacaacagcaataacaaaaaacatggcactagtaactcagagtggaaaacatgactctgctgttcagtggttagaaccagctggatgcaagatcctctggtcggattttatgtgtgcccagcctgtgagccttaggaaggaggtcagttggtttctttttcttggccaactagattggaaacaaaacaaaacaaaataaaatgctgatatgctgagttatgacaaactgagacacatgtcatgagaggaaaaatgacagctttactgctgcagtgattacaaaaaacacagcaaattaaccaccaatatggctttgtatgtagagtgaaacaactttattgcactgtaaattggagacctagaacatattttaggagtgtcacacctgaaaagctgacgattttccccaaattgctattaatatttttttatttttattagttttattttccacccaactgaaagctgaaactagaattatttttcctccctagaaaaattttattttgtagagttggacattttctttattacgttgtctctgtaagagttacttagctataataaaacagtcatatttataacttaattaaatctggccatttaaacagaaatacttgtaagtaataccaataaaataaaaaagtgaatatcatatttgataagttttgctcaaacagctttctttattagtgccttttatgtaactcagggaaaaaatatactgatccagcttggcctgaattttactgtgaaaagtcctcagatgagttaatatttgtttgctgtgttttaagttattgagctaagcaggggtgtcatgaatgaatgttcaggttgtgcactgtgcaagtctgccatatctcaagagccccaattcatatcctgggatcctcttttggttccaatttcaaatatcacactgtagccgagaatctcacttttaatgcccataacaaattattaatacctttatttccaatgtaacagtggccagataagtaaacccaaagttttaaatataacaggaccaacagtgttcattcatctaatccaacatgattacattactaataaaaagccaggaccttattttatgctatataatcctaatagttcagaactagcagacttattcagtttctatcagattgtgtattaaccaaacacatttctgagatgattttttttgaatatcaaagagcacacaggagtatgtggaaaattagggtaggagcatagtaggatctcaagaaatgtttgtttcatggttaattaaataaacagatggctgaatgaccatatattgcttttatataagaggaaaattaaaatctccccagagtcagttttaagggcagttttctttacactgggaaaatcgaacaaccccacagctgcctttggaagctgtaccttttggctgaagagtgaatggttcaacttctttgagtcagtccccatctgccttcccaatagggtcattcttttctgtgcctggcaatggtccctgcactttacaaaacaaagttatgaggtaggtacaattgccaccacattacagatgagaaaagggaagcacagagaattgagaaacggggtcttatgctagtcagtgatacagctgggatttgatccacgatatctggtttcaaagccagtgttcttgaccactacacgatggcccatgactgttcagagaggtactcatacagatttatacttcaatgtacaatatttcgagataaacagccctattgtgaatcagtgctacccagggctggccagaggtcttgcatcctaattaccagcgaggtcactttgatatccagtaggtacctctgggtccatttgtctgaccttatcaccttccgttcttgtttcccgtctctgtttctgctcagttagccaccaatcggccttctctggtcccttactcctgggtgtgttccatctcctcgctactcagaatgtggtcctcagagcaggagtatcagcatcgtctggatttgttaggaatgcacaatctcaggcctctgccaacccaaatgaatcaggattttcatttaacaagatccgcaggtggttcaaacacactttaaagcttgggaagtttaggtgtggtacctattttccagaaccccaagcagctgggccaatttagaacattcccttggtttgggaaggttcgcttctccatttccctctaggacttccttgttttcttcaacaggccccctttacagccctaaccaaccaaccacacacacacacacatgcacatgcacacatacatgcacacctacacatatgcacagatgcactgacacaggtgcacaagtacactttttgggaaggcagttttcttttctcgctcatgtctcagactgccttggcccttcccggcttctctctctgtccctcgcacctgccacttcagctaagatctctcctttccacaacagtggatcccactctaaaatttcaaaaaaacgaccaaatgctggggaaattagctccaggttgctctctcttttactttgccaaataaagacattaaactaaaacaagacaagctaccctagttgataactatccctttatgatctcagaaaaaaagaatagggtttaacacattttacttgataaaaaattcactatattttcttcttgttttcttgtttcatctcagtgtgattggagttttagtatagcttcacagagtaatatttatagatcacttcagattttgtgaccattgcagcaaaaatgttgggtgatcagccatgtctttctctcctttgagtcacctactcccaggaagattttattatcccaattaaaacaagagaagtaaaggcttcccaacaggctctacttgttaatggaaggtggctatttcctgtatgaaactctcacatccctatttgtcctcaatggtttctgagctcgagcattttttttttatcatacaaatacagccagctttataaagaggaaatacatagagacaaggtactaaagaattttaaatgacactactctggaacttcaactgttctccataagaacaggaaagggtcctcagcataggttaacttaacaaatatttatagtgtgtggtccttgtcctctagactgggcgagaatccttgtcatccattctttgctactgcaccagtagacactattttaagtagttgtttgtggaattattaatatcatccctttaattgtggtctaataggaccacatctgttttgttcaccataagctccccagaaaccaacacagtggtgatgactacatgtgataacttatagtaagtggcgctaagcaaagaggaagcataggctgattacatttatttaagcatcagtgatagctttctattgcctatgtggttttaaaaaatcttctttcctttgcattcaggctcatttatttattctttcaaatgatatttatgacactcttactgtgtgccaggcagcgttgaatccacttgggataagggaatgaaaacaaaaggcaatacttcctgcagccatggagtttactttcaatttcctgcctcgtggggatgatatgaaagtgaaatgagcagtgagtgtgtattagtcagctcaggctgctgtaacaaaataccatagactgggtgggtggcttaaatgacaaacacttattgcttacaattctggaggctagaaagttcatgatcaaggtgctagcattgtcaagtttctggtaaagggtttttttctggcctgtagaagaagccatctcttcatacggcagagagagagagagagagagagagagaagagagcgagtgcacatcctcatgtctcttcttacaagggcactaataccaacctgaggattccacccttgtgacctaattacttcttcagggcccctcatcctaataccatcacattgagggtctgggctttaacacaggactttggtggggacataattcagtcgatagcagcatgttgaagtgattagaaaaattccctacatgtgaagaatgcagaaaaatttcttcacctatttatggagcattagttatgaaccaggagctgtgctggaatttggggaccaggtggtgactggaggcacctggattcctgctgctcatgggttcctaggcagtgctctctgccctgcctcaagttctaccctcctcttcctcttgactaaagctccattttctcctccttcaagaacctctcccttcctctttccgtgctaggaaatgtacccccagcattttgtatctatctcttgttaacacttataacccactttttcttggcctacttgttaatatctttcagtagtctgggaacctctcaaggtcagggacagggacttagttgttttcatacatttccaaatcctgctcccctccacctccctgaagccccagtacaacgcttcgtacagaatgagtcgtctgttcgtttgtgtgcaatgaatggatacattttgtaatgtcaccctgtgtttaaaactcccaataacttcccaaactgcatttaaagcctaattctttgccctgtctctcctctgcctacctccccacctctccagtgtggaatagcgccattcccttgttgccccacactgcatggtggccactgtctttccttctgtttctgaaaacagctgaccccattctgtcctctcagttttacacttgctggtttcctggttcttcccatggcctggcttctcctcatcattgtcactgtcacctcctctgagaagccctctgtgatccctttgctgaactgatctcttcttttcctagacatcctctttcaaccttttcaaatctcattttcctcatagcagttaccattgtatgaaattaccttgtgtatatttcatttcttgtacgggaacagtggttctcaactgggaccatttgcatcccagaggacatttttttgttatcacagttggggagaagatgtcactggcttccagtgtgtagaaccagagatgctgccaaacgttctacaatacacagaacacccccaactacccctagcaaataattatctttggccacaatatcaatagtgccaggatgagaaccccaggatagaatttgcacaatgaggatggggcctcttctgtctggttcttgtcaatgttctcatggtctcaaatagcacctggcacagcacattcctttagccaatgtttgtgtcatggataaattaagttctatgttaaaatataggagggtaatgtgacttgggggcctctacctcattattttggaagaaatggaatcagaattcaatgccacaccattagacattctctagtgaaatgatgccgttaactcaccggtgatcatgctgctgggacaggatgggagggtgagaagtgggggaaaggggtgtttttctctattcttaaggatgctgtgaagtacaccttgcccagtgttcagggggctgaaagtaagggcagcacctatctgtgtcatgcatgacaagaggctgtgccagaaagggaagaatttttaaaaataataaaaatcccgatttaatgataaataatcatgccctgcctctgacgttaaagggcatcattgtctcggctcagcgatgtaaatcaccataatggacgaatcttttaaaagtaacatggaatttaaaaatggaaaatatgagggccatgcaggatgactgtgaaaatcatccgtttattatctaggtgtgcttaataatctgctgcctggggaagaatcatttgctaaccctgaggaatggctcattttccaattcaatcattcaggccagcactgcctaggacttctcttcctcctcccttcccctccccactcatgacttctttcgtcactgtctagaaagagtctatcactgccataacttccattaaagcctccactaaacagtttcaaaagaacaaggtaggttcaccatgagctggtgcagttagcaacaaatcagccttcaattggtgagaatgactcatttgaaagggattattagccaaatgttaattgattagtggaactaaagcaattaaagtgaacagagccttagcctgtctccacccatcctcaacgcaggcatctttctaccatgtgactcaccctctgcaaattatgagcattcctggtccacagagaaatggtttttcctttttacggtttccagaattttgtgagaggctttgaaatcaagaaatggaaatcaaataagtaagtgcaaaaagacaatctactacttggtatgcctgtatcagatagaattggctggattatgctgctgtaacaaatagcccctaagtcacagtgacttaacacatcaaacgttgactttctattcacgctactcatctgccattagttgagggtggtgggctccacaggttgcatccccataaagctgaccttgcataatacacaacccccaaatcacaatgacttaacacaacagaagtttaccttttactcgtgagttgcaggtggggggcttgcttgttttcatcactaactgctaaggagacaaggacgttattctctaccatggacttggaggagaaggagaatggaaataactgtaagaaaccctgttcattaccccagtgcctagtgccttatacaattgaagaacattagtcatcatcatattcctttccccaacaattgacaccattattgaagtttgcctatgttcagatctgtgctcattgctttatgtgcggtatctcattgaattttcacaacagctctgtggcatacagggcattgtaaacctccttttctgaaatgaggctcagggtaattagtaacttacccatcatctcacctagtaacttacagagctgttttgatccctagtttgcttgactccacagcccatgacatgctacaagtcgtactgaaataagtcctctctgtctttctccctgaggatctctcaaagtgcagtggatgtaattctggtgtttcacaacatgattttacatagcatacgggccaacattttttttctttaacagttgatatgtatcgtaatgtgtatgtgaaaaagatataactcgtggcaaaatcatgatctaatagatgttattgcttaagttgaggcttaactgaatttttaagtttaaaaatagtcaagtttttaaattaagtaaatataatagggaaaaacatgaaagcagtacacaattaatggaggtttgaaaatttgaatcttttcacataaacaatccatcaaacagcctaatatttactaagattgtctgtgggctagagaatactttgacatcacccgctttgggaagtatttatcatcccttccttttaatgcgtcttcaccccaatggttaagaactttcttttctgtgcttcagaagtatcttgtatagtttaggaccaatcacattgtatagtagttacctaacatgtctctctttcacaatagactatgtaactttcatgggattttattaatcttggtattttcggctactgatccaaatagatattttacaataaaatcatggaacttacctaggtggagtatgcaatgcagtgaaagagacgaacatcgcatcaataggattctgctacaagtaacaaggaaaacatcacattcaaactggtttataaggaattactggctcatgtaattgaaaaaccccaaaatcatgtatacatcagggaaggcttgctctagcagctggacaatatcaccaagaaggcaacgtccttctgtctcctaccatttcttgcagcctcaagacggcagctagaagactctagagttataaacttcctcattcatatccaacaggaaagagaaagtgtctttttcctgtctttcccagcagttttgtagacaatcactgggaatagaccaccttatgtcatataccaagttcccaaaccattacccgttttcaggggcatgaagtgagctcattggcttggtcaaggtcacctgctccactgctagtcctggaaagggggtctgggtttccagaattctgcagaggatctgaagcaaaccaggggctaacagaagggggagggcaggacagcagataacaagaaacatgaatctgactccagtgaactggaagcattttgtaactagcattgaatgcccctgtgtcaccttgaaagtgatgactttgcctttgtcctatcacaggtcaccactgcctttaaatcagattacctaaaagcaatgttgaactttaacacatctttccatatgctgtgcttcccgtaggcaagattttgcatttgtgctattttctccagccccttttcctggtttcattttgcataccataaagatcatgagaaagcttaattcaggacacaactcttaggttctcagctctacactgagatcctgttttgtttcaccttgctaaaaacgtcttgcccagtttatctttcaattcgttttctggatcttcgtccaatttaaaaatatgttaagattatttttagatcctagtcattagtgctatgagactgttttcaaacagatttattcttttctctcatttgctcaatatttgattccctatttaaagtgcttttctcctttcaagctttctacaaatctaaacattgggagaaaaaaaatgagggaaaggaccaattctctatatttgtgtaattgtaagcaaaatgtgctgtactcttttctggccacttggcacataggttacaggtcatgaactatatatgaaggcctgcagttcaaatgagatccacagatctggtatgttcctcccagactgtgtttcaaatagacaagtgttagttgcctgggtttttttttttttcttttaaaggagacttcatttaaatttcagggtattttatatccaaatatagaattagagccttctttaagacttgatttgaaagcactgaagtcactatcctatatggcaataattgggtggagctttcactgttggggcttaccactcccactgtgactgctgggacaaggctcaaacttctgaaactctgtggccaaggagaggagactagctacagtttcttactgaggaaagggagtggtatcagggggttgggggagacccctgttgttgaatgtccagaggtggtgcctgtgatattgacccccataggtgagctcgtgtgatgtaatggtcaggtcttggcctttacgtgaatctacgtgaattccaaagtggtgaatatatattccaccactttggaattacatcctcgtgggcaagttgcctacttcctccaagcctccgttcttgtttgtaaaatgaggacattgttacaatctactcgtagaattgttttaagaattaaatgaatccatgagttgagtccacaaagcattgagcacagggcttgtccagtggagaaagtctcatgaaggttggttatcactctcttcctgtattagtctgttttcacactgctataaagatactacctgagactgggtaatttataaacaaaagaggtttaattgactcacagttctgcatgactggagaggcctcaagaaacttacaatcatggtggaagatgcaggggaagcaaggcacgtcctacatggtggcaggagaagagagtatgcagggggaaactgccacttttaaaaccgtgagagctcgtgagaacccccgcactaccatgagaacagcatgggggaaaccacccccataatccagtcattccccaccaggtccctccctggacatgtggggattacaattcagaatgagattcgggtggggacacagagcccaaccatgtcacttcgtcaccatcggtcctcgtgttattactacttctattactgttggtccattttaattttttattctcattcttcctttctctaatctcctttttctcagtctcatttcattttacttagcatggcatccttgtagacaaggtggtggtcaatatttgtatttcccagatggccaacgaaaacagccatgtagagcctaacagctgtatcctaactcgcattacaagctaggatctggtgttcacaaaaaaccaccttcgtttctgctgtttgtaaaaaggtccgaaaccactagcttcttgtggctatttttggccccataaagaggtcttggctcttgaaatactggtcacattccaattaaacagattgtcatttgccttcctgggccaggggtgaatatcaccacttacttcctgcaggaattgccaagagcaagtgggtctaaatggggtgcacacccactgtgaaactgaatagccaaaatccaaagaccagggatagcctcaggtttacactgtgatactgtgtttctggataaagaatctgataaaaataaaagaagctgctgtatctctgtcttctacctggagagaaatctccacagtcttccaattaagaccataggctccggaaacagacctgaactccaacctcaggcacaccacttaccagctatgtgacctcaggctagtattaaccctcaatttcctcatctgtaaatggggaactatattaatgtctaccttttaggataagtgtgtgaatgaagtaaggcttgtaaagcacttagcataggtctggacagagggagctctacacaaacatttgttgctgttatgactgaaacaaatggtggaccaaaccatggcagtttaacacacatttatatctcccccatctcctttcccagcccttcccctaacgctgtggaatagcacttggattgaataaaggagggaaaatggttttaggacaataactgaataactgaaccactttggatttttttctggggggaaggtgtgcaggaatttaagcagcatcagcctcacctaggaacttgttagaaattcagactctcagaccccaccccagacctactgaatcagaaaccatgacaatggaaccacgtgcgctgtgtttagcaagcctcactggtgattccaaagcacactagtttaagaaccactggtttaaatggaagttggaactccgctgatgctgaatcaaattgggtttgccttctttcttcctttcttcccctctacttaacaatgcctgtgtcagcctatttggaaccaaatttctctgtctcataatggaaagaaaaagcatttcttccaataatttccccttacgataaatatgcatctctgttttttatttttcaaaagccccagaaaagcgtgatgtgggaccagcctttaccaactccagcaggaactgatcataagtccaatgaatatattcttaggaaggacttgtcctaattatccactgcaggttcatcttactgtgtctctacaaccaagccatgtgctagatggcaagggaggaagctgtatttctatgttaagtaacactgatgtatccagatacttggtttttaagtagtaatttttttttaactttcaggcaagtaaaagaaacaaagtatcactgaggctacttgaaggaatcttgggacctgagtatgtttattaagtatttttcttctttcttcttccaaaaagaatttgaggagatttttcaataaaagagataaaatcataaaagtaacatggtggagggacaaataggggctcataatgaaggagcagatcagttgtgccagaaaacctaagctaagaagtgctactctaagtgactgcaaaatgaaactcagaggttcctggctgcaaaggcaaaaagagaaacaggatgagtcacagagcctttgttctctaacaagaaagcagatacattcatcaggaaagaaaaactatttcctagcactagactctaagagaaatttatcgtggagtcccttacataaggtacatgagtatgtatatttaacacagatctccggtgttaaccgtgggatttatctgtcttttagggaagtaaatttcagagctcagcaggttgacagtgtctcttcaaatttacagtgtcaacgtgcagtaaactagctgcttcccatgccacgttttactggaccgtctatcaatatttgatcaaattgggccaaagtttcaaactgcccttaaatttacccagagaaagtgcttgtacatgcagaatgcctgagtgggcttcaaaattgagtccttgtgaacgggaagcatcttttaaaaatatatctgcaccgtttgctcaagtctgaatccttcctaagaatgcttataatgtaaatctatctgcaaatccatagttgcccataaaaatgccaagcacatggcttgtttctcccaggtatacagacaataatttacgtgtaatcgtgtctctaattgtatatacatctaattgtacatacatctaacatgaataatgttattcacagaacatatgtggttgactaaaataggagttcctttgtgtgaacctaaaggattgattgagatgataaaatatcatcgctgctctgactacgtctttgatatttgtatggaataattacatgaataggtccaatggttttattaccatggcgatgcattgtgtgttattgcttctcttcttgtctaaactggttttccaggactctgctggaaaatgcacctctataatcctcagactacccccccacccagatctgctcctgactccatataaaagtaaattcttatcacctgggaatgtttttccttcagcctaaaacagtctctgttccatattcttgaaatcccaggatggaagtcttgcttgaattatagaagtcttgctggttgaagcattgctacattttttgggtgtattgtttcaccttaatatataagatccttttactgtccaacatgagacacttggaggtggtgttcatggcctttcaaggctggttcctatcccatagtcagagatataatctatagagcctttaactcaatgggaaatgacagaaattgcagcgggaagcagaattttatccaaatgttcttcctctgaattgttaagcattaaacctcaacattaacctaaatgttcagagatagttctttcctaggtatgtggaatattaaccaaatggttttggcaatttacatttttagcctctacgcaggagtacattccatttagaaaactagatattctaagtggtggaagatgtgacagaggcgttaatacttgaagccatcatagttcaagttgtagtttcagtattgtgctttaactcgttttttgtttttttttttgctttttgttttttatgagttatcaagttatcatgtttcaaataccatttttcttccttatagttaaaaacaacagcagccaaagcccttgcagtgaatattttgtgatattcaaacctgtgggaaacaggaatatcaaggacatttttctttcctggattttctagtattttgaaaattttgtgctgtttataaacaagcaaattgtccactgaaacgcagcacaccagtgagcaatctttgagcagtgtagggaatctgacttgagcgttttcctgagtgccctctgtttgcaccattagtgttaaatgtctgtcagcctttccattgtagtcactgtttttctgggatttattactcaactctaaaaaccagctccaggctacaaattgccataaaggggaggtcatttttttcccctattgaagtagtgtgggtgggaaggagaaaaagtattcattccaccctcttattttttttttgagtcaaaaaacaaaaaagctgtactcataaccagagtgtatggcttgatattttattgaaataaatatgtacataaattattatcttatcttaaaactgttggatgatgttgagagattattgttagtaggtcaagccaaaacttgacgttttcaggggaaaccaaatcatatgttctgcttttaatctggcgtttcctggtttgtgttttaagggaaatgtccttcattggatgaacctttattttgtgccttggaaccaggcatacgtgataacaggatacataaaaggtggtaattgtccctgacctcaaataattaatggtctaggtaggagaagaacattaaaccatggtttcctaccatgtgcacttgctcttgcagattttttttattattatactttaagatctgcagtacatgagcagaatgtgcaggtttggttacataggtatacacgtgccatggtggtttgctgcacccatcaacccatcatttacattaggtatttctcctaatgttatccctctcctagccccccacccaccaacaggccccggtgtgtgatgttccccccactgtgtccatgtgttctcattgttcagctcccacttatgaggaacaacatgcagtgtttcgttttctgttcttgtgttagtttgctgagaatgatggtttccagcttcatccatgtccctgcaaaggacgtggactcatccttttgtatggttgcatagtattccatggtgtatatgtaccacattttctttatccagtctatcattgatgggcatttgggttggttccaagtctttgctattgtgaatactgccacaatagacatacgtgtgcatgtatctttatcttgcaggtaaattttaagcatgcaaccctaaaatatgtatatcgtgtgtaaattatatgcatatgctactgtactagcaaaaaatgtgcttcattaaaatgtgtacaaaatggaaatttgaaaagaattagatataaaaattaagtttatgtagatagtattaaagactatatattattatatattttatagatatgcataaatattatttatatgtaaaactccatcctatttgctcatagtatttaaaaaattctggcttttaatttttttaaacattttatagtaagagcaaacatttaatatggttcataatttttgaagatcttggtttattacttcatcatatattgattcaaagatctggttgtcaattattattattatgtttagtgacttcatttaaatggctgtactagctgagatataacacaaaaatgcatgagttcaagtggatccaactaagcccagatgatgaagtccatgtatccagttgcataggcacattgaagctgcccttcctggaaataggctgagatttaaggaaggagccaaggatcacatcagccctccaccttgatgaacttccccgccccacccctgggtgcctgcccccggcagatgacaccttcacatctagaacaagtcaggacaccagtgtcaacctgtattttcttactttcagataaaaattactatttcttacctaaaaagaaaacacaaatagatataaattcaatttcttatatgatcttcctgtcacaaaatgaatcctctcttgaactctctgcagtgcacacaggcccccaaagggagacttactaaaatgtaatatgagcttccaattctctcctatttataggatgaccctcacctttaggagctcttcgactgccagtgatactctttcagccacccccacccataaaaacatgtagttctctttcacccagacagtagtccctgagaaaagcgacagaagtagagcccgttaggattgcaggaggctgtggtatggcagtgtctggctggtaggtgtcccatgtacccaacaagtgctctttgtcatttgtttttcctctctaagcaggaaattattcccaaccctaagttagtgaaaccaaagcttcctcttcccaacacacacacatacacacgtgagtctgactgcttgaattcagaggcaggttccatgaatggaaccataactggagctggtttgagaccaagtttataagaaacaggatccttctcattgtgcctgccctcctgtgacctgtctgcaagctcttctctatgtcaggccacctctggccccaactgtagccccaagatacctgcaggaattgggataccaaggcatcctctcatattcttttttttttttttctctgagacaaggtctcattctgttgcccaggctggagtgcagtggctcgatctcggttcactgcagccttgcctcccaggttcaactgattctcctgcctcagcctctggagcagctgggaccacaagcgcacatcaccacgtccagctaatctctcatattctttaaaaaaatttttttctaagacaagccaacaaaacttctatagctatcatacatccacaaaaagatgtttattgtggcatgcttagtaaacccatgcaaataagagagaaaaatataactgtcacatccacacatggtatgctgttaacattttgctgctttgtctttctgtacatttaatgcctttttaacaaaatattattatacttaaagtatgtactattttgtaatatccttccttagttaatgatatatcttcaacatcttttcatatttttaaatagtgctgtagaagcttagttttaataataaaatcaatttcaggctgggcgtagtggctcatgcctgtaatcccagcacttttggagatcgaggtgggagaattgcttgaacccaggggttcataagttatttatgtatttatgtttataaagacagcgagaccctgtctttataaacataaatacataaataaacaacaaaaactacatttcattaaatagtactctaatgtactctaatgcattaagtcagttcaagttgtttgcaacttttttgctatcacagccatattctaatacaaaaaaaaaattgcagctgaatatttgaatacatctatgattattttcttgggataacttccaaaaagtggaattactgagccagagctgtgtttatgggttaggatgtacttttcatttttattttaaaatatatgcatatgtatttatacatgcatatgtacagttcacatatacacatacacacatatccatatatgctcatatatgtatttatgtatgaagcaaaatggtttcatccaataatacagttctactatatatgctgttagagcacatgcaccttatggtactttatctaatcttagttgttgagaaaaaaatcatttgtcaaggaaaatgatggctaaccctgaggctgaagtaccagatagtggagaggggaagggatggtagaagaggatggtatttaccacataggaggagtgacaagtagaaaagcctggaattggtaaaagacgctgcgttcaaggtaccaacaaatagttctgtttggctggaatgaggatagaagatagatgaaagataaaaggaaagacccctgctgggtgcaggggatcgcttgagcccaggagtttgaagctgcaataagttaagatcgtgccactacactccagcctgagtgacagagcaagacttcaactcaaaaaaagaaaaaaatgtagagaccctgaagggacttgaaacccatactattgagtttacaccttgcgaacagcacagtggggctatggaaaatgccatttaaggagaggagagggtggttagatattttttttaaaaaagaaaagaatcccagtggtcaccaggtagaaacttgattgcagcgacacaggactgcagtcaggggaaaagtggggcactgctgaagttatccaggagacggggcttgtggttgcattggaggaaatggcaggacatggaggcccaggagctgatttcagagccattaagaagcagcatctacagagtgcaggaaatccagtctcttctctctgccttgggctcaatttgttgggaaatggtggtggtggatagcagacatgtgggtaccaagtaccccatatgatagaataagtactggagagactgagctgatccacacatgaaagccacactcatggagtttccccactacatcccccttcacctggatggattttccaagcagtgctgagaataacaaaggttcatcctcagaatgaactccttcaagcatcacatccccgatgtggccatctttaaaccatctccttgtttcaattaagagcaacagcaatgtgggccacagaacccggtggcgggaaccctgggctttgtttattgcctaacaccttggcaatgtttgatgactcgctgctcctgttggttgggaatctatttctttgccctggaaattgtgacttctagactgaagatgaaagatggactttttctctttgctttgtttttccttgttggttagtcactttcattcaatgtcatgctttttggcggaggtggtgccttaagatcttggacctactgagtcagttggggcaggtttctcagcagtttcctcagtgcctgccggattgtgagatgtgctggagatgggaataactttttcacactttacatgttccaggaaggacttggtggtgagtgaaatggcttcctctggcctgcactctggagattacaccatcttctagagctgggttcattaactcagatgtctaaaggacccaggcaagttacacaaatgaatccactgacaggtgtaatataatggtgatgtggcaaggactgtgattaactgaacagttcttggcttttataacagacacagctatgacaatgtgttgctagatctctcaatttttttagttcattcaaaactatgcttttctaattggatacttacaaaggaatatgggtaaaacatacatgtgaattatcaagcatactaatactatgagcacctatcaacctatctatttgaactccattcaaatagaacattgtaagtattgttcaggtttcttgagtgagacccccaatattacacacctgccatctgcagtagctgctgactaaaattgaatgtttataattccctcgttttcctctatagctttaccacatgggtttatatcccaaaacaaggtattattgactcattgcacatatacaaagagacaagtacaaaaatattcagtgaaattatttgtattagcccagaaattttcattaaaggagaatataaaaatatattgtggttttaaaggcataaagatgggctaggcgcagtggctcacacctgtaatcctagcactttgggaggctgaggcgggcagattatctgaggtcaggagttcgagaccagcatggccaacatggtgaaaccccgtctcaactaaaaatacaacaattagctgggcgtggaggcacgtgcctgtaatcccagctacttgggaagctgaggcatgagaattgcttgaaccctggaggtggagattgcagtgagctgagattgcaccactgcactccagcctgagcaatagagtgagaatctgtctcaaaaaattaataaatacggataaaccacagttatgcaattcatatggatggatgttggaaagatgtgtggcgaggtgaacaagcaagttgcaaacgtacagtatgatcacattttgtgttttataaaactcaaagtgggaggagctttcctttttcttcaaaaattctagaaatttggagtttttttgatatctcccaatttttttcatattagaaagcaaattatcatattaaaaatgcctatgactgccaaataaaatctgtctttggatgatatcctgtgagctgcatgcttctgacttctgctctaggaacttagatcaactcttgttttaacatctgtgacgcacctactatatgccagttccttatatttcgtcatttaagcctcacaacccctcaatagggcagaaattattattagttttagtcccatcttatcactgaggcacagagagaggaagtggttttcccaaagctataccaccaggaagtaccagagctaagatttgaaccccgccactcagcctcaaaaatcctatttgtaattactgtgctaaactgcctcttccctcccacctggtggttgatttttgctgaagatgtgtatgtggtaaattcacagacgacactattctcaaggttttcagtttccctggaaatagagcactgacttaaaaaaaaaaaaaaaatagtcaacctgggttttgcctaacaggaaattcacagtttcatctttcaaaaagaaattccgaactcagccaagaagccaagatcaagcacatcatggtcagcaagcatcaacagaaggttttaggttgctgtatggagtctctctggtctctgggtcaattttttatatcatggttgccctttataatgagggcatcaattctgatgagatatagatggagatattcttaaataggttacagtatgtgaagtttctgaagtcaatggccattgtgtctctgaaataaaaatacctttgtttcttctggctataaaaggaatacacatacattgtaaagtgtggaaagaaatttaaaatcacccacagatatcaccactggtaatatttggactacagcctttcaaaagctttttcacatagagatgcgtaatgtaaacattataatcatatagaggatagcgtaatccagtagagttttacaatcttttttttcctgagtacttaaggagaatatctttttccatcaacagataaagaaacacgtaaaaattttaaatggtgataaatattccattgtatggataggacatatttatttaacctattaacttcgccttattgctgaatgtgggctttattttttttaaaatttctttctattctaaacaacactgagatgaacatccttctatttgcatctttgcacacttgtctatttttctttttgggatagcatcccagaagtagaattgccaaaattatgcctgtttaatgcttttgctacttattgccaaatcaccctagaaaggataatttattgacttgcacataaagggcttgcttaatgggatttgatattcacaagctttgaaggtgctatcgcagcctgtcatgtctggggcctggaggtcctctctgatgtaaatcaaaacatttgagttaacaacattcagccttgtcagtcacccacaaattataggaggcctcctctgtctttgtcaataacaaaaaagggaaaaattactccaaaatggcataaaaattaggaaccagacaagtagtcaccaaaagaagacaagtgagacaacagttgaagaatttcagatttgtagtggagtgcagcaagtgaacaggaattgtctgggtttatagagaaaggcctgtagcatctgactcctgcgtgcttggtgacagggtcagtagcacagagctgggcacagagaagtcactcacacagacggcaagggtggaaaagtgtatagagggttgaggagcttcactctgtagtgggagggtatgatcctcaacagcagcagaatgttaatttccttaagtcttaaatcttgccctgatatggtatagatttttctctgcaactctttcatattttcagctcttgcattctgtagcaccacatgggagaatatgttactcaagagaaaatttttagtgatgtgtgttttgtcttcatttctgaaaatagtctcagttgtggaaaggcaagtaatccatgtgcagcatgattagggaaggaaggaaagaaggaagggagggagggaggagagaggaaaggaagaaaggaaggaaggaagataggaagagagaaagaaagaaagaaattcaaagcttgagtctttaaaatctttgcgtctctaaaagaaaaggatttagttatgggtctgatgcatacagctggtatttctagcaactagtgtgggcttcttttttctgctgcaatctattcattctgtgcatcttaccacaaattgctccaagaggaaacacagcctccttaggaggctaaagtccaacgaacgtcagatccagaacaacattgctttgcgtctctatttaacgttagagcggatgactttttgacacgtttatagctgacgagttctatagccagtcatgcaggacgattacgtttgaactaatttgatgaatcaacttgatgttctcccatagcccccataaccttcaggagcatatgtacccaattttcaactggaagtcaaaaagaagctttgaaatttggctaatcccatcatatccgcaggacccgtctggtggaataatcttgggacataaactcttgattgatgccaaaaatgggaagaaccacttggtaatatcatcagggccatcagtcaggcccttggtaggtcttgagatagggtttcagaggccagcgattgttttgtgagttcttgaataattttgtggtgagggaagcagagttcattgtcaaagcatttgggggtcagaccccggggaaaaatcatttctcattgttggattcagtttgatggggatttgtgagaaccgatgaggaggcgtaaagatttcctgagttacttttccccatgtcctgatttttttttttttccgactcctttcttgccaggaggcctgctagcatagtcattcagagcatgagtgtgggagtaagaatgcctggacataaatcctgcccttaccacactcccatcattgcacaatactgggccagtcacttcacttctctgcaacttgccttgctctgtgaaatgtagataataatcgttcatacccatggggttatactggaattaaatataacagtatgtacaaagggacataaacagtgcctgatatataagctttcagatactagaagctattggctatagactagtgaattttggtgactttccatgcccagaaagttgatagaacttgattaatccaaacagattaagtaagtagatgctatgatttgaattcacagctggtattattttttccccaaaatcgttagcaaaaagactattgtgccatcacatagtaaaactgattcttgctatcgagaatagtccttttctacagctgagagttactagtatgtggaaccggctgaaagcaggtggcttgctacatcataaattgggttggctgggtacttcatgtgttcattccacccatatttatcgagtttttcctactgcatgccagtgtcaatgtgtgatgtgaaaagaggagaatattttggggaaaagcgaacataagctctaccagtgactacctatgtaagcaagtcacttaatcactctgggccacagtatcttcatcattaaattgagataagcatgatccgccttctaacgtctcctgcaaggagcagatgggattgtataatccaagggcctaggtcagtggctggcacatagaaggtgctcaataattgctgtttttatgccaggaatttgttttagtcgccctctgcattgattgataaaaagctttttttttttttttttttttttttggagacagggtcttgctgtgtcacccaggctggagtgcagtggtgtgatctcggctcactgcaacctccacctccctggttcgagcaatttgcttgcctcagcctcctgaggaactaggactgcaggcatgcacccctaggcctggataatttttgtatttttggtggagacaggatttcaccacgtcggccaggttagtctcgaactcctgaccgcaggtgatcctcccaccttggcctcctaaagtgctgggattgcaggcatgagccaccgtgccctgccaaaagccactttttaaatagtaagaggattttggcagccttatagactcagatatctggagagcgtagcacaggacataggacatattatattctcgataaatacttctcgaatgaatcaatgagtaaatgactagcttgagcttactatattaataatacactgtttactagtaaatcaacacgtgggaaacaatagacagagacttgtgggagcatggactttgaagtcagaactgggtacaaatcaggcttggaaacactagctagatgcccccttggacaggttacttaatttctctgaggctcagttttctcatttacaagttatttgtaataacagctgcattaaagggttgttggcttatatatattatcaatagcttttattatagtgctgcaaaataaggtgtctgccccatagaggtattgaaaatctactcactgggcatctactttgtgccaggcactgggtactggggataaagagtgagcaagacagacaagatccctggcttcagggagatgacgaactggtgggcaggctggacaataaataaccatgatgacttttggtgaaatagaatttccaagaagataaaatagaataatgtgtttgtgagtcggaagttattttacaggaggtaatcaagaaaagctcctttgaggaaggaacatgaaaacagttaccaatgagaagaaggacccaagcatgccaggatttgagggcgagggcttccaggttgagggaacagcaagggcaaaggccctaaggcagaaatgtttgctccagggttcttttcacaccacaaacaatgaagagaatggcccatggtaaagtccaagatcctcaagagcccactcctgcaggatcttataggtcaggataaaatatttggattttattctgagtgtgatggaaacgattggcagggttttcacagctgggtggcagagtctcacttccttttcaaggtggattactccagcagctgtgaagattatagagatcaggatagcaggaaggcaagtaaggagactcctgtctagaaagagataattatcactggaacaaagaggatggcagtggtgagggaggcatgaacgacttaggacgtggtttgcaggcagcaccacaggatgtagtagaggtgaagcagagagaaggcacctggcctctgtcagcccacacgactacaagcctggaagcctcaagttgcatttcttattctctggttgcttctccactctcctctgtgatttgctgctgggtgccttgatctccatagcaatgagtcctcttttctcctgtgagactgatctggggatcaggaacctcacctctgactcccagtagaggtgaaatcagcagtggttcaagggaaagaggcaatgcagcagagactgatttctgggatgaggttttttgtttttttgttttttagttttttaattcaatatttacatgggtccacttagtgtcataaaaggttttaaaggaacttgctataaaaactcaagaggaaattaaatgcaaaccagtacacaccagatgcaagataggaatcaagaaatatagtgaatatttcctgtggtatattaattaaaatattatttccccgtaggaatataataggatgccatgatctattgatttatttattcaactagaatttgccatatatgtcgctccaagctggatatgaggaaagggaggtagataacagtccctactctcagggagctttcagtttaatggggaagacaagtatcaaagaatctctataaaagaaagcagagttcattggtttcatagcagagagtagctatttgtgtagcagcggagtgtaggtgacagacacattaggatcacttttatactacaaagattagaagtgcacatcaaaccattagcatcagatagatattcctgactgaagacctattcataagtgtatattttttatacatatttgttagaatatcagtgattaagaaaatatacacatattattcacttaaatataaaatatgtttattgatctttaggaaagacatttcacaaataatccttcaatgccatattaccaagtaaaattttcctctaactcaatgactaattccgcttctcgaccacagaaaaaggttgaatatgctattgtgtgcagagcaacaaatgaagtaaaaatttatgatgtacccacttaatttgacccacatgtactcaggatttcacgtgaggcttgggagttatttattccttgctgaaatgattctattctcttaccttgctttttcttttctcaatatgataaacattaattaagtatctgctttgtgcaagacactgtgatccgaataagcaagtcatgttctgtgatgttaaatgttataaaaataacttttattattcatattataacaggaaatttacattttgaatgtacctttaataacgtgtatgtatatgcacgtatacatacacacatatatacacatatgtattagaaagaaatagaaacacatatacatacacacatatataaacacatatattagaaataaatacacatatatattagaaagaattagaaataaaagaagttttaaaaagtaaaaatgtattctacattttattatgtatatcatatataatatagagaggttgggtttattgcattacacattatatattatatatgatatttataatctgtacataatatgtgtatgtattactatgtatatgtatgtatattatatatgtatttataatatatattatataattatatatattacataaagtatatattatatattttaaaagcatgtaacaatacatattcatatataacaaacattatttcacataaactttatattatatatgtgtagatagacatctctttaatggaatcatattgcttatatttgctgtaattttgcttttttacttagtttcatgaatatcagtttagtcattaaatattcctttacattttaatagctgctgaatatttcactttttaagttgatagtattgtatttaattatggtattagtgcagtgtattagtattataatcctcctaatgttgcatttatttattttttccctgatcatttctgttatgaggaacatcctgtcagttaaataagattctttccctatgatgaattttcaggcgccgcctccgaggtcggggcttcctgataattgccagtgtcacccttgccaggtcactcaggcacgggtcagtgagcgctcaggaagcagaggcagaaagggctccacgtgtgctatcactagtcagattattctgcacacaataaaacattcttttgtacaaaagtgaaatccctaagtcaaactgtggcttataagcagaaatcctggttagtatttcaaagttctcttagcgttttctcctgcgacttaaaagacttaaaaacgtgaaaagacatggacctaagactccaaacaaaaatacatttctttgaaactaaatagctcttaagtaagaaaaaattctatagatcttcaaatcatcccctaagcaaaatattctctaattaagtatttctgtatttccatctatgttcttcccaggcttggggctgttgatcagacctatttttacgggtaagtttctaggggtcatagaagatacagattttgacctgcttaatgtcaagaggttgcacggttgatttgtccagttgtgaattctatgaatgaagctttttgcttaaataaaacgatattcccctctggctgctgtgagcaccgggagacttgtttcggcagtgcctgggtgctggggcagggccggtggccctggatcatccgctaccaacaggacttgcctgtgtgcatctggtccaccctctctccacacccaacttcatgagatgcacaggggcctgtgtgcagagcagggcgagtctgccaggacagaatgcctgggtctgcttggttgggtctccacatgcgctcaggtaaatctcagtctgtcgctcatgctcgtattcactgtgctgacaagctccaagcttggacagcgtgtttagtgtaccgcaggatcaccttcggggagggaacgacagcctgcccggggctaaaagaaactgcccaacaagagaatcgcttgaacccgggaggcggaggtcgcagtgagctgagatcgcaccactgcactccagcctgggcgacaagagcgggattccgtctcaaaaaaaaaaaaaaaaaaaaaaaaaaaaaaaaaaaaaaaaagaaactgcccagaatttgaatgttgtacttgaaacctgcttgatccttaaagttcatttctagtcatctccatcaataagcctttgggtttgagaagcagaagcttactatcccagctaacttgggccttacaggaagattgggtttctcccctggggaagagtggagggttgctgtttacggcctgtctactcctaccaagcactgtgctaggcatgatgaatgcctttcctgctgaatcctcttctcactaagagtattgatcatctccatttcacaggagaaatggatctgaaagtgatgacataatggctgccttttcttagaaaatcccaaaccctggcccctcctttaggtgcctccccaagctctcattctgtctacttctttaactttgtcccatgtccagcctttccttcctctggctacaccaaccgctttttaacacatgttgcttaacacatatttaatgagggtctacctgtaccaggtgtgaataaaagagcatccagagagataaaggtactgactgttgttattgagagatactcatgcagacatatgtatttgttagaataggtattctaacaaagttcttctgggtccaagggccttttcacttcttgttttttttttgtttgtttgttttgttttgtttgtttgtttgtttgtttgtttttgagatggagtttcactcttgttgcccaggctggagtgcaatggtgcgatctcggctcacagcaacctctgcctcccgggttcaagccattctcctgactcagcctcccaagtagctgggattacagtcatgcccggctaattttgtatttttagtagagacagggtttctccgtgttggtcaggctggtctcgaacttccaacctcaggtgatccacccacttccacctccctacacttttcattcctgccatctggaacccttctccttcttggtctacacatggggggatgtgctttctcaccatctcagtgacttcatccactttggaacctaccccgatcatctgattaaaaatactccctgttcccagccatccttgatcaccccagagaactttccacactcttgttgttctttaatttgtctacatgaatatttctcaacaacaagtgtcagtacctttttctctctcgatgctgttgtattcacacctggtacaggtagatctttattaaatatgtgttaaccaaataaattgaacaaatatttataggcctctttctgtgcacttgacactgctctaggcactggggatacagcagtgaacaaaacaaataaaaatctctactctaggagggaaagacagatactaagcaaaagagtgaatagttggtcaacatggtgaaactccgtctccactaaaaacacaaaaaattagctgggtgtggtggcaggcacctgtaattccagctactggggaggctaaggcatgagaattgcttgaacctgggaggaggaggttgcagtgagcagagattgtgccactgcactctagcctgggtgacagagctagactccatctcaaacacacacacacacacacacacacacacacacaccagtgaagagggccggctgtggtggctcacacctgtaatctcagcactttgggaggccaaagtgggcggatcacaaggccaggagattgagatcatcctggctaacacagtgaaaccctgtctctactaaaaatacaaaaattagccaggcgtggaggtgcaggcctgtagccccagccactcgggaggttgaggcaggagaatcgcttgaacccaggaggcggaggctgcagtgagccaagatcgagccactgcactccagcctggagacagagcaagactccgtctaaaaaaacaaaaacagtgaatagttagttaggacctcagggagagatgcacagtggtggtggggtaaagcaatcagcccagagacgaggcctgtctgacaaggtgagacctgaatgaagtaaaggagcaagtcatggtgatgtctaggagaaacatgttccaggaagaagcacaaaagtcctggggcagagtcatgttggtcaatttggagccgcatggcacctgtgtggctggtgtggagggaggagggctaaatcagagggcaggtgtggggtaagtggtgcaaaggcttgtgggctgtgctaaatatctcagcctttggtgtcaaatgcaatgggagccatggaagggttttgagccaaggggtggcatggataaatgaatgaggttacacaacttgagagcagagaagctgggatacaaactgggctctctgagtgcagtttgctcccaccccgtccccccacccatcattgctgcatctgtccctggccacgtgttcttccctgtgcattttatcatcaaagtgaggccttagcctttcacggaagcctggttgtgggggcttagccctgacctggtggcagggtccattttgttttgtttttcctgtttgtttggggacttagtgtccacccttggacccaacgacccttacccaggtgcggtgtcttccagctgatcccacagtggggcccaggttgcatcagctcagccttccttaggcgcagcatttgctccctccccgagtttgacaccccacagcctggcacggtgccaagtatgagtaaattgggctcagggttcctgttgttcctattcacacagcagctgctttctttaccgtgccatgaacctgatctcctggcattgtcagtcagccctctcttctcaggtgccaaggggaaacgaaactggttagtctctgcaggaagctgagccgtctcctaagtgcccacccggctccttgtgcactaattaccagacagtggactgaaccttttgcatattttattagtgaggactctaagtttcgagtgattggaaacccagtgggtttaaatcaagaagattaatttatggcccatgtctccaaaaggccggggaggccttggcgttgccaagttggacataagggctcaaatgactcatcagaattaggtcttattctttccatctctgctttcttctggaaacttctattctcaggacctagcaagatgccaaaatcagattacatcctaatatctcaataagcccagatttactttttaacatttctagtagacatctgggaattgagtctccatgcccagtcctaagcctgttgctttgcccagggaatgcagttctctgatccgccagttctgggtcacccattcagccctggagccagcctaggagtcagcccatgtgaccctccaggaccaacgacataaaggggacagtttctcaaggaagactagggtcaaattaccagatactggataggctaatataacagatgccaagtcacgctcactcttttagttaatcctcggagaaccctgtggcatagtaattatcccacactgcagatgaagaaggtgaggcccagagaagttaagctggccaaaagtatgcagctggtaagtggcagagccagcatttgaatacagattcgcctttctgcaaaatccatgccacgagtctcctgaaacttgaaagaaaagtgttaaaacaggatcgagatgatccttgatacccactgcctaaagcagccctactggcatgagctcattccttcttctaacttctttgaagcatttcaggtgaattggaagtctgttttccaggaaatctgattatggtggcaagttcctcccagcaagaacagagaggagcattctgagattttcctggaaggaaataagcctctcctacattgcagcatattacccaaatgtgggaaaaaaaaaacatatgcccatgacattctcttatataaatgtgtgggggcatgtttcaaaagcatatatattaatatcttctgtgtgtatgtatataaatataggtatttatccctctgctggattcataagcatcgagtgattcaaacattaattacaatctccttggtgagggaaaatatttttccttctatcatgttcattttaggatcatctgaagttcatctttttagagggtactgaatcatctggcaacacaatgttctttaattgttagattgtatacacattttggcgttactttttctgaacctcctactcccttgatttttattattaactgtgagaaatcacttcagtgtgctaggcatatacattcgtatatatacacacactgctattattatatataatctcaataaattctgacaatgctttgaaagaggcagtactattattgttattatggatgaggaaagtgagtttaaacaatttgcctaatgaaacatgaagatcatagggaatgatggaattgggactcaaatttcgagttctttcacttcagaaagtgaaagtcagttactcagcctcagaacaactgacatttatccatgctattaactactacactattatggaagtagagaagaaaaaaaaaaaaaaaacactggaattccaagcttccaaggctaccaaggaggctaaaacatctattggggatttagtggaaaatttgcggaaatctatcattgttataagtgcatatgtttcgatccagcaattccactagaaatgctggcacaaatgtgcaaggatgtaaatataaaaaatattcaatgcagtattgtttatagtagggaaagctggaaatacttaaatgtccatcactaaaaagtcagttaaataaattagagtgcatgattccagtggagtgcagtgtcactgtttcttaaagtaggcagaacctctaaatacaggcatgtggacaggtaaataagaaatattttaatttttttaggttggcaaagaaagcataattccagttttaggggaaaaaagttagcatctatgtctgcatggagacgggataaaggtgaatgtaaatttgattgtgcataaaaaaattgctggaaaaatataaatgaaactggtaacagtggttacatcagggaagtttttattctggggaagggatgttcagttatactttatatgccttatttatactgttctcaacaggaggtggttttgcctctcaggggacattaccaaatgtccccgtttttgttgtcacaactcagggagtggggtttgctactggcatctattaggtagagaccaggaatactgataaatattatcaattacacagaacagccctcacaatgtaggatcatcctgcccaaaatgccaatagcaccaagattgagaaactctgcttgtaaccctaagtgtctgagtttattataataagcattcattaatcttgcacttaaaaaaaaaatctctgaaacatagtctccattctgatacttgagtggaattattgctgctgctgccttcatagatcaaatcaaagtcacaactttaatactttggccatgtggacataatatactttttcttccattaccagaacaatttcttcattcgaatataggatttgtatatatttatctttcagtctcaaagataggcaatcttataatataggtcccatctcacagattaaaaaaaaaaactgatacctggggaagctcattgttttcatggacagccaatgccagctagaaccttggtaaacaaatttaatagtttctggaaatattaaattgcttaatctcaaacatctgtacttcgctggagactcaaagaaaaagcactgagctatattttcagttctttaattgggataagaggtaagtttcctaagtaatccttcattctctatgagagggtatgtactccatcattttgtcctccgaacagaaatacttcctgctcaccgggcattcacatttcagtttggagatacagggtgagtatcccttgtttgaaatgcttaggaacagaagtatttctgattttggattgtttcagattttggaatacgtgcaaagagcatccctaattcacatatttgacatttgtgatgctccaacgagcctttcctctgaacgtcatatcagctctcaacgtttcagattttggagtcttggatttcaggttttcagattagagatgcacaacctgtgacacatatcttctgtcatattccgctctgtagcgtagccatggtgtgttgggttttgacacatcaacattctgagtgcaagatgatactgagtgtgactggtgtggagtgagctgcgagtgaagtttctaatgaggaggaaaagtgtgctgtaaaatctgtcatggtccttgtgacaccagtagctctcacttagcaagacactagctacggccatcagcgtgtcagtggctccaggacagaaggaagttgctgagccaaggaccaagacttgaagtggcctgtgttaagcacccccttcaccaactctgaagtgtaagtcacagagttcttggaccccagccccagttccccaacctttaaggatgcagacagtgctgcttgtatgttttggggtgctttctttctttgtttgtttttagacatggggtctcactgtgttggccaggctggagtacagtgatgcaatcacagctcgctgcagccctgaactcctgggttcacgggatcctcctacctcagcctcctgagtagctgggactacaggtgcacaccaccatgcccggctaattttttgaaaatttttgtagaaacggggtctcacttttttgcccaggctgatcttgaactcctggcctcgagtgatcctcccagagtgctgggattacaggtgcaagccactgcacccagccctttatttttaaaaaattaattctcatatttgtcaggatgagataagttatgtggtgacaaagaaaaatccccaaatctcaatagcttaaaacaacaaagatgcatttaccactcacactccatgcccacagtgggtcaactgagggcttcttctgggactccagatgactagagcagccaccatctgacaccagcatggcctgcccctgtgagaagggaagagtacagcgggtcatacgctgactctcacagtgacgtcctcacttctggtcacatttctctcaaccttccgtgatttcaaaagggtggggaagtgcagccagaaaatacacatgagaatccaaaaggagaagagacccaggatatttgcaaatggttctagtgatttccacagtccactggtagttggtgtaaacatcatgtgcacatctgaattcctggatccttttgagaaatcacaggaccttgggacaatatgcatggtgtaggaaagggggcactcacgaatagtgactccgtttagacgagacatttccccctcagttcccaggctctacctatcctgattcattcacctaaggaatcagctttgtccctgtaggaatttggattggcaacttttgaattaaagtctaatccagtggtaacagttcacccatggagtcagataacctggcttcgaatctgggaaccacccttatggctgagtggatttcactctctgcacctcagcttctctacctatgggtagtaatcccggagggatgtggtgaggcataagagaaaatccatataaagcacttaaatgagtgcctaggacagagacaacacaactgttccatcatcgtcatctttccaaagtgccactctgcatgtacctttaacttacacacacaaaaatggggtcatacagtaagtgctgttgatggacagatattgaccagctctgctcctttctctgtatctgtttcctgtcttataaatcaaaagggtcggctcagaagctttctgaggtcctttccaattctgacattctgtgactccaagatccaaggagggcccccagattccttcttgagctttcaaagcattcccgatgtgtgctttagagtgggtctggacagtgtatctgtcaagggggctgcaggcaagaggggagacacgaagccaaactatgagacaagcatgggaacagccttaaccgcaagctctagccttgaacccatccaaagaacactgatgtgagccaactgtgcatatctgttgattaatcttcccaggaaatgatgttctagaaccctccacagccacgtgacctccgccgccaacatcagccatcatctggactggtcttttcatccagggcactcgatggtggctagcaaaaggacccccagcccatgctgaatgccaggatttgtatttttatcttgccctgcaggctgcctcgccttgagcaatgctgtgtgatgacagagatattatcaccctaagctaaaatattcaccaataacgagacaatgaaaacagttgctagaagtctgcggtgaatgcagagggagcaaactctgttaattattcaggaaatcctcttcataaattcatttagatttctgcaaatgagttagtatttgattaaaaaaaacaaaacaaaacaaaaccctgggaactcagcccaagcagtagagtaggtataggcttgaacaagttcaggaatcagacagccttggacgttcagccccatgaccttaaacaagtctgtgccccctcaaaacttctgttacctgtctacaaagtggggatgctaatactaacctgtggtgttgggaaggtggaactaacaggatgcattctgtgtacttcacaaaaggtctggctcatgagcccttaatgcatgttatgaacagggtaacttcactgtggctttcttattaaccatccctgtgtatcgctctaaggagagggcagagtctcaaggctattcatgtttgaatgaaggtgctggaaagagacagaggcgtaagggatcctgcatgcctcatatgaagacacatgtgaacacaaggaaacatggctccagtgttgcagctgcttctgatttttcaagataaattttaaaagcataatatttatttgaaacctcctgatttttaaatgttaacattaaacaatgccggtttggcttctgtaaaacagactctaactcttcatatcctgaaagataacatgactttattaaggtataatagaagcttgtttctgtcttatataaaggtctgatataaaagtctcggtaagtggttgagagctagcaggacacttcttggtgttgggatcccaagtaccttctctttggttgctctgccaccgtaacacaaggcttccttctgatggtccaagatggctgccctggattctaccattatatgcacattccagccagcaagaaaggaaaagcagtggaaggcaggcccctctttttaaagatataacctggaaatcacaaatattacctccactgacagctcagtgtctagtgcattgccacaaagctgtatctatctgacagaggctgggaaatgtagtctctattctgagtggtcaaataccaagaaacaggagatctatgagtgaaagaaaaaagaaacaaagctacaacaagtaattcagacttaagaaaaacactatgacaaccaagcaaaatacagtcacgggccattttggagcaaaaaaaaaccattctttactgaggatgtgataagagagtgtccttataataaaattcctgtgtgttaaaactactgctgccttcaacatcaaaataggttccatgcatggagtgcataccccatgcatggatgtggtgttaggtgctaaacatacatagattttcgctgactctgaaaacagccctgcaaggtagacaccgtcgcacttttaattggcagtggaaacggaggtcagaaggggagacgggatgtggccaagttagtaaacaggttcgtaagtggctgagtggcgatcccatctcaggcctgtctgcccccagcgccttttgtggtactctgtgcttgaatacagctggcgctgaccttcctctccgctcaacattctgcatcattctccatcttgtgcaaaggaggaactgagagccacagtgtcacaacatggactccagagccccagggtagagccgatcaaagacagcccaggacccattctgacttctggcctttcccgttgttctttgatctttgttttcataagttacaaattcctccacctacttacatttttaaaagaaggggaggagagagagagagagagagcaaaataataacttcttagccggaactgcttttcttcaaaatcacgaataattgttttcctgctctgtctgggaaggcattcccctctcatcttttgcccaggacttggcaatccactttccatctccccttcgcttgtctttctttagcatccacgttccgtgcaatccatcatcagagccattaccctcctcctgatcaagggtggaatggaaaagctccctctcccttcaacacctaccaccagctctttgatttgccgggcgtgggcagcaggaaagtttccggcggatgacctcagaccctctccatagagagccccaccagcagctcatcaccatcagtctgcaaagtgagaactcaagtcaggctctttggaaacagtcagcaaatggcttctagttcactcagtgcagaaaagcttttcttttttccccttttgtatgggattttgtgagtggggggttctaatagctgctcactacacacctccagccacccactgggcttgccagtgttctgtgcaacacgccctgcgtcacaggtttcaataacaacaaactctgcacatttttaaaataaaaataaaataggtcagagattcacccagctggccagtaaaccagggcaggatttctctcattcattctttattctaccgaaactgtctgaaactcagtcttcatgcctatgaaatggacagaataatcatatctatttcatgaggttgttgggagtattcattgacatcgtgtttgtaaaatgcccagaagcccttacaaagggcgtcaggccctttgtaagcaggaaaggaaagctggcttggatgaacatcggctattggtactgagctaacaaagcagctatgaggaccaaagaggggcccctaatcccttctctagcctcttttctcaccattccatgactccaattttgtgttctgacaatgtcagattccttctagtttccctcatgcaacatgttctgactgggcccccagctcctattcacggtgctcttccagtacgaattcctgcccccacccctcccgtcttcatggttaacatatattcaacctaaaactcaactgagaggtcacctcctccaggaaccattcatgattgcctctttacttttcccaagctgaggcacatcccatccccagtgacgtagggagtcttagtttatctttaatttgatttttcagacattttatgttttactgtcttcaccattaggtagtgccctccataaaggaagcgcttgtgtcatatatgtctttgaattcttaggattcagcttgggattgtacactgaaactgctgaaacacctctcagagtagacaaggaaggaaaggagagacgaagggaggtggggtggggaaggagggagaaagaaatggtgaatgaagcacacagcacagtgccctaaggggaaaaaaagcagcatttgaatcaatagtaggtactttaggctgggcagtggctcacgcctgtaatctcagcactttgggaagccaaggcaggtggatctcttgaggtcaggagctcgagactagcctggccaacacggtgaaaccctgtctctactaaaaatacaaaaattggcctggcttggtggtgcatgcctgtaatcccagctactccggaggctgaggcaagagaattgcttgaacctggaggcggacgttgcagtgagctgagattgtgccactgcactctagcctgggcaacaaagtgagactcaatctcaaaaaaaaaaatgtatatgtgtgtatatatatatatatatatatacacatatatatatgtgtatatatatatacacatatatatgtacatatatacacatatatatgtatatatatatatgtatgtatatatatgaatgtttatatatagtggctacttaaaaagtgttttgtgattggtatatttagttgttcttactaccgctgccgatttactctcactgttgctaaccaaagagcagagttaagtctgcaaagaaagataccttcccttttcaatgatgaggttagtgtcttcacaaataaagcatctgataccttagtctgatacattagatacaaattatgactaataatttgccccattttccaagttttctcttgattgtgttgattgactcaataacgactcagctcctgattcagagatgaatcaaagaatgtcttgcccgcacggggctgtgagtctagatggagagacattcgtagggagctgtgtaatgtcagcagagacgtgtcataggaagactgatgaagcagacgatggagaaagttgagttgagttggttgctatttaaaaggggttgtctaggaagggtctttgataaagcaactgaataaagagctgaaggtagtaagtgttaagatcaaaggatctttataggagatccaaccacctccctctaaatggtagttcttggtgtgctgtgtgtaaacctcagagtatttgcagaaaggagataactatttgggagctgcgtgtatcaacatgttccagaatacataggatgttggtagaagccacctgaagataaaacagtctgttgattctggcaaaatagataaacaatatttactatctttactctagaactctttagagctttcaatagattaatacacattgcagatctccaagtgggaactagagcatttagtatttcctaacagaactccttattcaagaagcatattgtagctgggcatggtggctgactcctgtaatcccaacactttgggaggctgaggtgagcagattacctgaggtcaggagtttgaaactagcctggccaacatggtgaaactccgtctccactaaaaatacaaaaattagcagggtgtggtggctggcgcctgtaatcccagctacttgggaggctgaggcagaagacctgcttgaacccaggaagtggaggttgcagtgagctgagattttgccactgcactccagcctgggtgacgggagcaagactgtgtctcaaaaaaaagatattgtaccacttgtattcagaggaatgaatgtattttggtaaaaatgacttttgagtgggtaccaaatctaaagaaatattcttatcatattactctgtggcgcacgcacacacacacacacacacacacacacacacacacacaattcaggtggatttgcactggagccctgtaagtattcaagctcttttgctgtagagaactaaagaaaacatcaagatatcaagtagttttattgatttattccataatattttctggaacatattggcttgtctgagttacttacaggccttgccacctggcaaaaatcatttcaaattattgggaaaagagccacagaagtggaaaatatcaagaatatgggctccgactgcacaaggctggactcacacacaagccctgccaagttctcacacgagtctccgtttatgttgcttctaaaatggggtccagttgcaggacaaatttttgattttaatcaaaagaaaggtgcgaacccatagaacggacctttgcaggagaaagaaacaattgtggatggatgtgaaaaccgaggcagctgttgcttcacatagataatatgcccattaccttttggaacaaaattaaacatttttaagtgtattaagatacacataacattgcaatttatcatctggaacattgttaagtatacagtttagaagtgtcatgtatatttgcatggttgtaccaccagtctccagaactttttcatcttgcaaaactaaagctctatacccatcaaatgacaactccccattctctcctactccccagatcctggcaaccactattttatttcctgtttctaagaacttgactattttaggtacctcatgtacgtagaatcacgccacagttgtctttttgtgactggcttatttcacttagcacaggggtcctcaacccctgagctgcgggtcgctactagtcctttgcccattaggagccaggctccacagcaggaagtgagtggaggaccagcaagtgcggcattagattctcatagaagtacgaaccctattgtgaactgtgcgtgtgagggatctaggttatgtgctccttatgaggatggaatgcctgatgatctaaggtggaacagtttcatcccaaacctccttcctcccctgagccaccagtccttggaaaaattgtcttccacgaaaccagtccctggggcctaaaagggttagggtactgctgacttagcataacatcttcaaggttctgtgataacatgtatcagaatttttttcttctttaaggctgagtattattcctgtgtatgcatatactacatttcgtttagtcattcatctgttgatggacacatgggttacttccacctcttggctattacgaataatgctactacaaatacagtatacaagcatatatggctgtacaaatatctcttagagaccttgctttgattgattttggatacatacccaaaagtgggattatgcctgttagattgcatttcttaagacagctctattgtgatacaattcatataccataaaattcacttcttaaagtataaaattcaacagtgtttcgcatgttcacgtagctgtgcaaccgtcgtcgcggtatctaatttagaacatcttcatcaccccaaaaagaaacttcatatcctttagcattcacacctccttcctcccttccctgagccctaggcagcctccggtactggtagagagactttctgtctctatagattgacctgtttggggcctttcatatacacggagttctacgctatgtgatcatttgtgtctggcttcttccacttagcataatactttcaagattcgttcatgttgtatcagcacttcattcaattttattaccaaataatatttcatgaaatggatatgccacactttatttattcattcatttgttcatttgttgatggacatttgggttgtttctgctatacccattacttttgttccttgccaatgactgcatatctgtagcctcataacattcagaatttcccttttctctaccaaatgtgcttaggtttcagggacaaacaaggtcctctgtgaaaaggtagccaagagaacggtctaggtagcagacaatggattcattcccccaccatcttattccctccaaataaaaaaggaagaaaaagaaaactgcttccatttgtcttaaaagctatatatgtatgtatatgtgtgtgtatatatatatatatatatttttctcgatatctaatggaagagacttgtgctctttagggaaatcaataggagggataacaaccgattatactatgagaaagaaaattttaaaagactctttggaaatagcgcatacataaaacatttttgaactatctgcaaatgtagaaattatgcctcaatgcaagggatccatgccaaagtaaaagtctgctcaggcttttatgaatttcagtgttagtggcaagtttatcactccagtatctgtgaaagccactgcatttgtcccatgttgtccattgccatgagaggaaggggctaccctgtctaattagtgactgcgccctaactgaactcatagtgttttctgtatcacagttcttgaccacgtatccaataatagcattttgattttattgagtgccagattaaaagatccttaggggtttggacaacatatttccttgctctggaattgaaaagacatcgaagtcagatccggagcgaatcgaggaacgatgtaccacaaggtggcccacacaaaagctatgtgggcaattatctcatgatttgagcagcctgacaaacttctcccttctcactcatatttcacacagatgcagccacggtccaactttgttacaaagaaagagaaacttgtcatttgtttgatcatcagcatggtgtaagaatttgcctgtcacttgtttaggataatggctgaatttttcagttttcaattgatgcttggcagcttcgatgtgttagattgctctcaaacaactgaaagaaatccacacatcctatccattgtcaagctcatttagcagattattctaagactaaagtaagggaaggtagcttgtgctatgaatcttttaagaaaatattacacagtgtgaacaaaagcaaatccgcagaactttaaaatgtcagagcccaaagagaacttagaaatccttccattgaaacatctgaaacctcacatgcccacagagtccaggcaagtagcaagccaacagcaagagatgtagattgagtctttgccgccctaggaggggttctagtgtgccagactgtatgttttcataaaatttgcaaaagtaagatgtttaactttaattcattaatagggctgtcactttttgacatcctcctttttttctcccttatgttagggtgttagatggcattggagtcaccccaggaattttgtattcatgggctatgggcactatacagcttttaaaacttcaggatccacaaaaccagcaggtcagatagacactatggcaaagtggaatgctcatgctcatttaaaggaggtgtttttgcttagttcctgacaattactgtcaggtgagaattgaagggctcagtgtggtcagttctctcaagggaagccagaaatccagatttatatgtcaaatcttctgatttcaaaatgttgataactaaccgaacaacactaatctgaaggctgaacttgatctgtgggctgtcagtttttatcctcaggctaaattcaacccttgctattgatgacaaaaaaagcaaatgaacaggtctaaaaataattaaccctctatccacaccattgtcttccacaggttttatattgaaatcatcaacctggttttcttataatcattcgttgagcatttcttgagtgttaagtgtgcattttaagtacatttgggtttccctcaagcttagctcttgattaaatgagtccaaagtagtccacatccaggttcagagttaggagacaggactggatgtgaaattatctcactgtgccaggattttgaaaacaattcactaaaatttgcaataattcagacaaggcttcagatacttattaagagaaaagtttcaaaaagtggtgtgggattttatatttatggacatgttattgtaatcctgctgttagttataatttttttgcatgaactttgagtgatttatagtacccagaggtaatgaatccattcccatttttactcctcctctcgttggaacatttgcatcagttttctccacttctcaaacatttttttcagttgatatttccatggctggacccttcttatcactgaggtctcaactgacatgttacctctttaaaaaaatctttccagaagatcttagctaaattcaccaactcccagctctctatcccaggggcagataaactatggctcacagtttgaatccagcctgcagtctggctttgtaaataaagttttattggcactcagctacatttatttgtttacctcctgtccatggctgcttttgtgctaccccaggagacttgagcagttgcaacagagacagtgtgacctgtgagtcccaaactatttactatctggcccttgatggaaaatgtttgccaacctaagacttttccattgctattttattttcttcacagtaatgcttatctgagattacttattttttacttgtttgcttgtttgtttctgaattctactcttagaatctgagctcctcaagagttattttatctatacctagaacacagtaagtacacaatatattttggttgcgtgaacttaataaattccatgcttcagccttttttcttatagcagagagggctcctaaagtccttctgtgcaggtgggtcctaaggatcctgctgcttttcagtactacagggaatatcaggccaagttttttattgtttctggttgtgcaaactggaccaactatatacactgaaacaggtgatgcctaagtaccagacccttgaactggatgaggaaaagccaagatgggaaaccactggaaaacatcgcagtctattgattctgtgtatcatttcgcccaataccgttgtcgttatcaagggctaactcttatttgtcaagtaaagaaagactacaggttcaactgacttctaagttagcaaacattttggttcctccctatctagttaaataaatgagtttctttttctaaagcctcaactcacctaaggacagggttctttgtttttctctgcttaattgcgtcatattcctccataccaactacacaaaccccagcacacactcagctgcagattaccatcctgtgttcttgtcacctcatgcattttacctgctggaaataaatgctcacactctgcccaatcccatctttccctgcacctggacatgcttcagaactccttttgtctgttcctctctctcatgtgcctgaactcttctgtgacttagaatctctagcacatgattcagaaccttaggatctgtccagtggcttcttgtctgttagtaatttttgttctctcaatgatatggtgtggctgtgtccccacccaaatctcatcctgaattgtagctcccataattcccgcgtgtcgtgggagggacctggtgggaggtcattgaatcattggggcaggtttttcctgtactgttctcatgatagtgaataaatctcatgagatctgatggtttcataaagggcagttcccctgcaccgctctcctgtaagatgtgcctttgctcctccttcaccttccaccatgattgtggggcctccccagccatgtggaactgtgagtctgttaaacctctttttctttgtaaattacccagtcttggatatttcttcatagcagtatgaaaatggactaatacacctagtaccttgtaagcatgcaccatttttactcatatttatatcttcctcttttactcaatttgtgtttgaccgaacttgaatctgcagtaccaggcccctggcattgtgctgggagttatgccaggcactaacaagaccactgaaatttcccagacgccctacaaccttcctttgggagttcccataccatatagtaataagcctgttaaaatgcacccacttgccaggttatgtatgtttttttttcttttaagaaatcataataattcatttgctttttatgttgttattatttattataatcataacttctttttatgtctcaaccaatgcatatttggtcatatccccaaggatttgaagtcccttgaattttttagaggcccaggagaagctggtatacctaatataccatgccccaaatacctactgtattcatactgctttagcagccctggacactcacagaaacagtgatgaacacgcatggttcttgtcctcagggagtccagagtccagggagtgaggtgcaggtaagcacgtggtaatagaaaactgtgagaaagtccattgtgaaggatgggcagaagctaaataagatttgaggacatggacagaaatggggtcaggaaagggcatggaggtcccctccctggaggaagtaatgtcttagatcggtggtccccaaccttttgggctccgggaaccagtttcatggaggacgatttttctaggactggaggtagggggatgatttcaggatgaaactgttccacctcagatcaagcataagttagagtctcatgaggatcgcacaacgtagatccctcacacgtgcagttcacaatagggtttaggcccttgagagaatccaatgtcactgcagatctgacaggaggctcagctcgggccataagactctctggcccaccgctcaccacctgctgtgtggcctggttcctaacaggccacagtctcgtactggtatgggtctgtagccccagagttggggacctctgtctttgatggcctcaaacaatgcaaagtggaaggatccaacttgaattctgcctgtcaaaacacagccaatttcccccaagttagccttgataaatctacctagtcaacaaactaattcacctgaagtcacaatcataacaggctacagtttgtgaggcctgatgcaaaatgaaaaggcagggccccttgcagaatttcaagacagcaacagcagggcattaaaccatgtatgggcccttctgagcatggggccctgtctgacagcacgggccacacacccatgaagctgaccccgttagttgttctaaaagtggggccagtgtcattcaaaagacagtaggagaaaaaaagcaccatggactaaagccccaagtacatagcagatgctcaaccaaggtttgtggaacaaggctgagtttctttagtttattttgcttttcttggaaataggcctgaccaggtggcaaatgtctgtaagaaagcagttactttgtcattttccctttctagaagctcaggacagatgcagagatccaggtctggcctggggaaacatgaccagtctggctgccttttgtcttggagatgacttgggtattaatacatatatttcgtttgtttgaaatatatacatgcatttaaatctgtatacaaaaccttttggtggacattttctccacatcctatcctgacagaagatgacgataaactcatgctagtgatttttattaagtctcattgagtgtattttcagaagctgccacacaaggaaatgtactaaacattttttccctgtctgtaaatgtgagtagtcttgaattgccaagccaggtaaaatgagtccatggataactcttaaatgtattaaactcctaaaatattagatccttctgcaacagatgaggtttggtagtgcagctcattagcatttgaacaaattagtgagacttttaaggcatgttgttggattgagctaagtagatgaacacagtgaattccagaccctaatgactccatttatcaagggagcaggttttaacataatgcataaacctttctcacatggccattttactatgcatttagttctattgcaacatggtgctttgggcagaggaaatgaaaaacttaaacaaggttaacattccgagaaaagactaggaaaaaataaatacccccgtccctccccaaatgaaagatgatttacaaaaatgaaaatctgtatcgataacagagtcttacagatgacaaaatataccagtgatggtttgtgactaggacatgagctgccatttctcctgaattcatatccagttttagggataatgtaatgaaaatgttttagtgtgattagtaagaggttattaattggttaaagaccctcctacagctttgagatttattttgaggacaatgaagaattctatctcacttattttgtttcacgttcctattgactttgaaatgttgtccttttttctgtttatgtatgcttaagaagaagaactaaagcgactgtctttcttcttactcaggaagatttgccagaatttaacactaacacttcatccctttggaatacccagtcgttcaaaattttttgttttgcctattagtgatttaaaaataccctagcttcatgacatttgcagatgtagcattatggttttgtctatcaaggaggcagccaaaggccgagggtttgtattgtgcagggtggcatttatatgtaaaagtgtgtaattttactagtgagctgcccagagctatgtcgaaatgtagatttgcggcttctctcttgggctacattgtctctgcctgccagtgtagttgtaaagcagtacacacaaaacaggtcactttttacaaatgacttttgattctacatttatacggccattaagaaactaaagaagtcaaaatttttcagatctacctcactgaattttatgaaggaaaagatatgctttggtagattcataaatttaggggattttgagggctgtagaatgtatctccaacaaatggcaaaggtctatggcaaataactctgatttctcaggagctgtttccctgctactcacataaaaaacacttcactactaatacctaaaacaaccccatagttgcttattctatccaaactattatccaaagttatttccttaaaaagttgagtcttcccaatttccctgcctccctaatgaaactggttttctacacggtgctaggcaggacacaagtattgacagaataagttatgctaagttagatagctgaaactggatagaatttccatcactcagaaacagaaatgtaaagttggagcttaagcatggagcttagcaatttgtcttccatcttcagaaaactcaaaattatacttacgtagtaaaaatgggttaactaaataatatcctgaatagaaggaagagtgtttaaaagtgttttttcataaaagtgagtaaaaatattaaaatatccttctacacaacagtatcctttaaaagtaataaaaccccatcaaaaccgtggatatcaacagccagatttttcaccatatcctggcagcactcagaagtcagggcaggcctctcttcctcaatgaatccttttcctggttttcacagtctaggttgggtggtggtgtttcatttccttagtcattctatattcctatccattatcatacttattacatattgcttcattgttttcttatctgtctgtcaattcaatgataagtaccttaccggtaggtacaagatcttactaaaggttcctttcttggttctaagtacaaaattgacactgttgaaccccaaagaacatttgtgaatgaattaatcaatgaatgactgaatgcaaccctgaacgttttttgaagcttcagatattttgaacgccagaaatgacaagaaaatagaggtaaggttggagaatttcaatctttactctccttttaagcacatagaggaattctaccacctctttcaataagaatcagcaatgcacagatcaccagcacatgcgtcagagagagtccattgtaggggctcaacatatattcactgagctaaacccaaatgcatttgaacttctgcccagtagcttgtcaaaagacaccctgagtcattctaacagaggatcataagagatgaaaaggaaaagatataagattatgaaaacaacattgcacatctagtctggacttctctaatctgcccagtggtgaatccaggcagcaggttatgaagatgctgggagatttcctgtgtagagttgttgagctgaactagctttctcaactattcatgttaatgtgtcaccagtcttggaactttcttttactgacaggttgtatctatttttcctattctgtttttgtgaactcaacttaaaacatcatccagcaaggttccagaaagactccaggcttcttagtgagatgttatccaaatggcttgattctttggatttggcactagaaagagacatgttttttatgtatgatttaaactcaaattccattttaaaatcaacgaatgtgcttcacccaaccacctcaaatctcagagacatggcccacttgaaataaaggttaacaatcttcaagtttaattcccaagcttttctgatatcattttcccaattatagattgcatcattttttcttccctatgtaaataagtaagtctgggctgaagttaaaacacttaagcaagaattagcaaggctttctttaaaaaaagtaggccatatatcttccaagaaatctctatgaagagatgtgtttttataccttaccaggaagcagctgtggtacaagagtgggaacttcaactcttaaaagctgtttttaatctcaactaagccacatcaccagttaacctctctgattttgtcatctcatctgtaaaatggaaattaattgtgccttccctacagggctattatgaggataaaataagacaatcaccaggaaactgcttggcaaattgtaaagtgcagtataaatataagagatattaactataaacggtcatatgggaggttttcgagcacaaaacagtaagctagagaaaattctgaggcagtgcaaattcagaaaggaaattataaaagtaggtataaccatcctaatagttgtgacaatgtaatttcagaatattggtgagttacaacatataccacatttaagtgtttacaagtgttagtgtttacaagtgttagtgtttcttgaacttcataaaccaacctctgttacctttcaacttttcctctgcagcttcctcatctccctcagccttcacagaattgaagagagttagggccttgctctggattaggctttggcttaagggaatgttgtggctggtttgatcttctatccagaccactaaaacgtactccatatcagcaataaggctggttcactttcctatcatttgtgtgttcagtagagtagaactttttattttattcaaaaactctttgttggcattcacaacttggctacctggttggcacaagaggcctagctttcagcctgtctcagctttcaacatggccttcccaactcagcttagtcatttctagcctttaatttaaagtgagagatgtgtgcctctgcttttcacttgaatacttagaagccatggcagggttattaattggcccaatttccctaatttcaggaaataaggagggctgaggaaagagcttccctatttccagtttgtttggcacccccgaaacaattacaacagtaacatcaaagagcactgatcacagatcatcataatagatataacaataatgaaaaagtttgaaatattgcgagaattaccaaagtctggcacagagacttgaagtgagcatgtgctattggaaaaaatggtactaataaacttactggatgcaggcttgccacaaaccttcaatttgtaaaaagttcaagctttttacaaattgaaatacctctgaagcacaataaaatgaagcacattaaaccaagcatgcctgtatatgcacttaaccaaacatttccagtactgtaaaatactctaaaattctactttgcctatatattacatatgcacatttatatagatattatgcatttaaataaacattaatgcaaaggaacatatgcataaaatgattcataatataaattatggacaatttaaagatttttaagggtagatttcagactgtaaataaacttactactttcacactcatcccctgcagaagatgagaactggcagtatagtctaattacttaagtaggagtggtggacatcattgtgttattttggagcatatttttcatcttttcttaagtgaattgtaagtgaatagaaaatgtgtgtttgcttgcatgcatatgcatatgcaaaaatcaaaactgatttgcccaggtactcaacttgagcacaaaatcacaggcatgaatatgcaaggaaatttgaatgtgtgtttgtcagcaaccgaatatttggcaaaggggaaaaattaaaatagattgcacttagagctcaaggaaggaagaataaacacaaatttacaggtgagtgttagcaaacagcacatatattgaatagtagtctgaaatagacccatctgaactcggtgggaaattgacattctgtttgtgctactgtgtattagaactggaagcctcaagttatatttcttaatagcgatgcagcaaattactatatctacatggcaggcacttggcttttaacagctggcaagattgagggttatttgaggcatttaaaataaaaatttcagataagatcaaatcagtgtggtcaatcagcaagatagtcaacaggtatttatgacaccaccacttatctatatacatatttttaaatgttgtgcttgatgggatccgaatggggaaaagacccaaaacattaggagatctctggctctggtttagaagaccaaatggtaataaacaagggccttggagtcacacacacctgccgccagaacccggacacctcttactttctaagtaagctccacattttatgtgagggctaggttctgaagccaggccattaagcaaaagtcatgtacagtcagaattatctttgaaattttatgtcttctatgcttaagccttctttattttttttatgttactgaattaagaacgtttgagcccctatgccattagaagacagaaatttaatatcagccaagacacacacacactacttgggaggctgaggcaagaggatttcaggagtttaagagcaggagttcaagcctgcagtgagctatggagtgcaccatgcactccagcctgggcaacagagcaagacagcatctctaaaaaataaataactttttaaataaataaataaaagacgtagacagagaaacacacacacacacacacaattgtgtgaagccttttctcgtcagttttatgcccacaaaagtttgataattgctgtgctaatgaaagggccaaaaagaaagtctatgtgtggatatctggacttttgactcatcctgcctttaagatatgatactatcaaatccccagtgtgaggagcagatggtaagacttctaaagtgttcctgcttgccttcagggtttactctactcacttataataataagcctctctgactttaatacatgttaatagacctatttgatgtttagaggattaaatgaaacagtggatggcaacttctttaagggttaaattcgaaaatcggtacataagttacctgtgctttgtgacacttcttcatttatgtgatctttgtcaatgcacttaacctcactgcgcctcattcgcctcgtctgcaggatgatgcaacacacaatacctacttaaaggagttggtgacactctaagtatgataatgcgtgaagagctgttggcagactagtagcaagaaattaaaacatagtaactattttattattattacaaattattgttgtcgtggttgagatgattattattacttgtatgctctgagactttggacatgttaccagatctttctgtgctttagtcattcatctgtcaaaagggagcatgatatcttttcctcctacctcaaagagctgcagaaggaacaaaaaaaagacaaggggttggaaaagcatgaaaggttgtacaagtagaaggtgaaaacggaataatgaaacataatattcaaatcccaaggcaccccagtttcagggatgttgcaaaccaatgtaatctgcagaacaaggcatgtggctgaatagcaacacagtcgggacccaggcagatcgtaaatggttggatttgtcctgtccccacccctggggataccacttaaagtgcattccctctggaagggggcgtggaaatcttgctgtggaatacacaggaccctaccttcctcccagaaaatactaccatgaagagtggctttgtgctgcagacgtgaatatataggtctctagcccaaatggcaagaaacctattgttatttttttcacaactgaattaaattcttattataatcacctttgccattggttgacagaaacgtaatctctgtcaagttagggcatgtaggttaattcagcttcctgagattgtgcctaagttccagggtgtttacagacatccaagaatctgggggtcatacgtggttctcagttatcacctgtatccacgctgacttccgcagggatctgcagctccctttctgctcaccgactgaaggctattccggaactgctggggctttcctagaaacgtctcaggccccttgctcagttgcagcacgcaagcatctccagtcttctgctcctgcgtcatggtgcgtgtggaagaaggaatggcggcctaggggaggtggagtttctttacaaggcattggaacagagacctcttctgctcttgaatcgccaaactcaaggggaagggttggtttatgctccctccgacccccgactccactcgaggccaaggaggccctgcaagtagcaagtggaagtcaggacacagagctgcttctccgctccgagtctgaatggcaaagactgcttctccttcactgccccccaccccccacaattttcacattcctctcaatacccaggaagccttatcttctacgtaaagggaggtgagaaaatggaggtgaagtggacctccggctatcgcgttttgctctcctgaagctgtttcttgtttgtttttgtttgttgctttgtttgtttgtttgttctgagacagagcctagctctgtcaccaggctggagtgcagtggctcactgcaacctccgcctcctgggttcaagtgattctcccgcctcagcctcctgagtagctgggataacaggtacgcgccacaacaccctgctaatttttgtatttttagtagagacggggtttcaccatgttggccaggatggtctcaatctgctgagctcgtgatctgcccgcctcggcctcccaaagtgttgggattacaggcgtgagccaccacgaagctatttttttaaatgctaggatgtctccttatgaagtccccaaaccaagactaaggctccttgttcagctttctcccctatgatgcctcttctgaggcaagggctgcgtcttttacagagtggggtgcaggagacagcttcagaaagtcccgctgcaggagtgggaccagctcctcacatttcaaaaatattatccaccaacaatgtttagaacattacccagaaaggtagatttctgaaggagttgagcgtgcatagtagagcgtgattctgccataatctatgtggttggatgagaaccagtgaattgctttggtccgtttatgacaacgtgaatagtttgtcttatggtgataggggaccagtgattctagctttgactgtctcttcgatggttgatggtatgtaattgaaacaagtgatcctcccccttgccccccatcacatcctattctgccacattcttaagggaggtgagaagtaactctttatgctttgtcattcttgagcaggttttttgttatgtaaaaagcaattataattcagagaaaaacaactcaatgtgtgaaatggtaaaataattctaatgtcacttgcaggctccagttggggtctgcagaatacatctttgtatggaatagaaatacatgtgcccaaatttgagaattgtcactgaaaagtaacctttctctttctagccctcctgggcagtgcagccaagtcctcatcagtgccaaaaatatacatttagcaaatgtccatgccagcgcctcactcccagaatgcacagttctcccaagctgcttccagagccttctaaagtactttcccactccatctctgaccctctctaacttggtggtgttcattctgcagacaaatagatcttttgaaaatgtaaacgtgatagatacggtcactttcttgcctttaaaactcctgccttccctggcagttctgctgtggttctctgggtgtgttagtggctgctgggacaaagtgccacaaactgggtggcttaaaatcacagaaatgtactgtctcagagcttcagaggctagaagtgcaaaaacaaaggtgttggcatggcattgctcccactgaaggctctggggaggacccttccttgcctcttccagtttctggttgtggccagcaatccttggcttgtagacacatcactctaatctctgtgtctgttgttacatggctcccttcccctgtgcgtccgtgttgtcaggtggcatcccctcttttggtgtctgtgtccaaatttcctttgatttttaagaacaccagtcactggacaaggaccaatcctaaagacgtcatcttaagctgattacacctgcaaagacccttcttctgaataacgtcatattcacgggtaccaggggttagaacttcaacttttcttttcaggggacacagtttaacccataaccctgggtttattcaggtaaattccaacactttaccatcacccacaccagtctatggatcccgagtcctgcttgtctctttggcttcaagttttgttgttgtccttctcataatactttcatactccaaactccactggacttctctgttttttgaattgctgtgccacttcccactttaggaaatttttttgcaagctatgcattcttcctgaattgtcttcctctccttattccctactgcgttacttttctggcagaatctgccttaagcccccacaccgagtctagttgctttgccatctcctatagctcttccatggcactgaccacacttggcaatcaagaatgtatttgtgtgactatttaagtcataacaatcacaccagtgtaaggtcccagcaaggggtctctggccagagtaggtgcttaataagtaattattaaatgaataagtataagatttcataaatgctaaattagattacagtatggttggttaagtcccataggacacccatatgacttttaatcttaagaaaaatggtccttttcatgcactctttggattttagcacgctgcaacttaattttggctttgcagaggaatctattagagattttctgttgttttttttttccataaagaactgaggcaatgactgtgagaactggatttagaagttgaacacctaagaaccccgtttttcttaaaataaaaaaaaaggtagaatagaagagaaaggaaaggaaaagaaaaacaactgtgtcgagtgttaggtttacagttcagggaagcaccaggagccattttatctgattttgttattatttaaccactgcacaaacgagaagagcccataatcctctgtggaataatgcattaatcctcattagttgtcattcagttgggtctgctttctctgcgccatgtgaaatatgaagagataccttcccaagaaggataaatgtgttatctcatagttcacctactttagaatacccagtgggctgcactggaagtatatgttgtttatcattacttgtagggggcaagatgggccctactgaagactgctggaccgtgagtgatttatggtgctttttacccctccaccgttgggggaggtgtccacatggttagaattccatctgtcccgtatgcagcccctttaattaatgatttatcctattatcttccttcctgaaagaaaaaaatatcgaggttttactttatcggtaaaactaccatctaccaaaacagaatcattatctaaatccgagtgacaaacaagttgatgggagtattctggggaagagaaacctaaggggaaacgggttaacaaaatcccttgtttcctgagggaaacattaggaggtgttccctaatcctgcctagcaaaaggtcaatgctttgatacacacacacacacacacacacacacacacacacacacacacacacacgctcaagtttccatataacgagaggaaaagcaaagagacgccactggatgaggggagccattaatacagtgggtttgacagttggatgcttgaaaaaaagatgacttcttattaacatgcaattgtcaccatgttaataatgaaatattgatctgttcttgcttaatgaaaatcagcttattctaatttacccctggaaagaggaccacttagggtcccgttccaacatctttacactatccatctatgtattgtttatagctagatttattttttagtatgcacctctgagccagggaggggagaagggaataatgaatgtcaggtaaaccaaaattatttgtcttttcttcttttgttgaaattcagtcatcttatttagcaagaaaaacttcatgaaagaccttagaacaacattacagggtattcatgattttatgattaaatgattacaatcttttccaataaaaatactgttatataagaaatgtgaaccttagaaaatcactagcactcctcatctaaagcttgatttacagctatttataaccatatatgcattacagtaaggactgagagaatccacaagatttatcagtcttactcatggagaacaattttacacagagaaaccctgtctaatagcctatcttaattagctgccaattttgtgaactatttctgttttatagtcacagtttttctactcatttatttacctgcgctttcgaaattatctgtgaagcaatctctttcggataatagggaaaggagccagtgactgtgaccctctaaaaatgtagatcatttttatttacaatttaaaatgtaaatgctttggggtcaggcctctgcgaaaagagtaattcacaagtcaatacattactccttcacacttaaacattgattaccaagaggcacatacagtgatgtgtgtgtgtatgaatgtgtgtgtatgtgtgtgtgtatttaccaatgtagtggcttttattgtttctgttaggtgttgttgcagagaggttcacataaacatttatataggtttcagaaaacggttgttactgaggaagagcctttttctgtttacacaaattcagaacaaagaaacattgctacagcttccggtaattgacatgtgggcgtgttcttcaagtcactgactggaagaagtgagtgtctgagatttatttttgacaggacttaaattactggtagtctgacacatttttgaacaattactagacactgaggtgtttaaagtaatgggtactatttgtttgagggatggggaagtttcaaaaccgttagaacgaaacaattttccatttgattagtaagatgctaacactcacatttatattactaaatagcacatacataaatgactcctcgagtgagaattttttctcagaataaaagttgtactttaaaaaatatcccccccatttggtgaactggtgaatcatggagttcaagagaggaatgagcctctgtgctcactgtcagctttctcccctctagttctttagatcagtccctgaagtatacagagacgggagcattgtcctgctttgtttcaaatgtcttagaaactagggcttaatgttcattaattagtgactatctttcaggagcttctaaacattgttgaaccagccatctgaactccgactgctaaattaaaattcacatttcatgagctgctagtgtccccaaaagataaagcaactacagctgccataattggcaacacactgacgttttaagttacccaaagagtcaaagcagtcatttttcttcctccttctttcctgttcatgggtctgatgaagataaaggattgcaaagtctctgtcctcttcttttctatttactatggcttaaaaagccaggccaattttgggggaagggtctatctcacggacctacgtgttcttgcttgtagttcttaaagctgtgggtcgggagaacccagagctgacttctgtgacccatcacaggtgacatgggttttattgcttatccaagatctttttcctctcccctgcatccagggacgtccgtgaagtcatgtcccctgaatacccctggagagtagtactgtgtgtatctgtctataaaaatctcttttgcttgttttattggagacactgagggctttggattgtcgttgtctcaaccaggaatgatcctgtactgccccagctccccaacccaggccggcattttgcaatttgcagagtcatttttggttgtcaaaacagatgggagcttttactgtcagcttgtggggtagagaccagagatgctgctaaacatcccgtaatgcacagggcagccccacagcagagaatcacctggccccaaatgtcagtcgcgcggaggctggggaaccccggtggaatattctgtgctatgctgtagtagctggggtttgttttcctaaccaacaaatccaaacagaaaagcatcggggatgctaagctgggttggagcagaagtagtttgggaaattcttttgtttctatgacattaaggactttttttaaagggatgcatcccatgtttttggcttctttaaggcaacatggtatacaaatacaagtgcaaagagtatcttcagggtataccacaaaatcataataatccagcaatatcaattaccacttgggggaaaggggtcctactatgtttctctcttagaaataataaaaatattcattgactgaatgctcacagctgctctgcagccctgcttctgtcccttttcatttgtaagcttggaaaataaaattgtccttcctagtctcctcattcctcattgcaacatgaaaggggtgaatctaaataatgtcttgtttccattctatttgtaagagcccataaaattgataaactacttatagattttaattaatatgattaaaaataactgatttggcttcattttctccttctcatttgggtgttttgacaccatccctagaaggttttccaagactcctctgagaagtccatttttggaacctagaaagtatgggaatagagtctgtgagactggacatttccttactgtttactggggggtcgaggcaggtaaattcactagaatgggatcaaccattagccttgaaaacaataaaggcatatacttctgcccatccatccatcaatccattcattcaatcctccattccttcatccatccattcatcccttaatccattcatccatccctccgttccttcatccatctatccctccatccatccctcccttcatccatccctccctccatccatccctccctccatccatcccttcctccatccattcctccttaatccattcatccatccctccattcctttattcatctatccctccttccatccatccctccattcatccattcctccatccatcccttaatccattcatccatccctccattccttcatccatctatccctccatccatccctccctccatccatttatcccttaatccattcatctgtccctccattccttccttcatctatccttccatccatccatccctccattcatccatccatcccttcatccatccatccatccatccatcccttaatccattcatccatccctccattccttcatctgtccctccctccctccctccatccattcatcatttaatccattcatccatccctccattccttcattcatctatccctccatccatccatccattcatccatttctctattcttccatttacacatatggatagagacacatctgaaatataattaactgaaggttagagtaatttctagatgctgggctactgaatgattttaaaactttcttctttataattttctctattacttaaatacagtaagtatgagtcattttaacaatgaaattattattttttaaaaggaaggggatgatacgggatgagctaatggatgcttttcaacagtccaggaacactgttttgatagttgaaaagagtggttctcatcttttattaactccattccgtcaagttaaaaaaaaaaactggtctattttcagttttaggcctgggttgattgatgtacatttttaactttgagacatgcatgtttaattatagttttccactgacctcagtgtttgttacttatactatacattagctaaaagtagacactattaattatacagatttgtttcaggatttcttgggggcaggattttgctacatactttgggatgcctggtgatgtgtgaggtgcttccacactttctaatttcaaatttcaaggatcttcagtctggctgcagtgaaaagaaactaaaaaactgacttcgcaattctagcattgtaaaagacatgtacatacaactgtctctcaccttcatgacatccttggtgaactcttatgtatcttttaaactgctgttcaaatgtcgccttctcaatggagccctccttgaccactcccttgtgaagttagaggattcttcctttgagtaagaagttaaatgtttcactttcttctcacaataccctgtattgtacttggaaatagaagttaccacattgctgaaattatgtcctaagtatcagtcctttctactggattttgagtttccagagggctaggaccaggattcatgggtctttgtgttcttacagtgcctcaattgctcaccaggaagtgggctggccagaatacaagtcagaatgagatggatgcagtacgaagtgtagaaatccaacaaatgtgtaaaaggtaaaggcaaaccagatttttttaaagcttatgattgttggaaagttcaagtatacacagactaaacagctggacaaaacttgcaaaacaatgaagaaaggaaagaaaatagtgattgctatgtctgagtttcagggactcataataaaggactattcagattaagaaaaggctacttggaaactatagatactaattatttttaactatagatactaattatagtctgaattttaaagaaaaattcaggcacatctactctgtgccagggaaggtgctgaaggaactagcatgtgtattactcgtttttcaacagagatatgtattgttagtcccatttaacagatgaagcaattgaggcttagagaagcaaatgacttacttgaagtcatccagctcatcagaaagaaccccaaccctcccaaggtatttgaccttgcaggtcagtgtttttcccactcaaccacagatgttttatgtcctcttttgtcgctgacgtttcctccatgtggaaagctttgaaagtgctccagtcacattttgaaatttcatgacaaaaaattgaatgtcatccaaagcatagttgaggatttaaacatccctgtcaatcctggctgtcatcaccaaaagatttctatcccaacgatagatcattgtgacgtgcttggcctaaagggccctgggctgttataatgagtaagattggaatctactgagtaatgcaaataaataaaaaagagacaggtagtctcagactttttcattattgccttctttgctgtgaagctcatggactgctctgtgcaaaggatctttctttttaccattttaatagcctgtgcaatgggattaagaaagatcttgggtttttcattcaacagatattttcatcattaaaatgcttactgtttttgagcacataagtgactctactggaatggtagtaggaaaatagggacacgaaggggatttgaagtcagattatgaaagcactgcatgccaagctataaaaggagcgacaaatcagggaggttagtttctgatactaaccttggcaaacacagagaggggagaagcaagtgcaaaagccctagatgaaaatgagtttggatagtatgttctagaaacagaaggcagcaggacaggtgagaactaaacaaggcagagcgtgataagatatgagaatgaaggtggaggaaggagtagggtgatcaccagcccaggctgctaggagactgagggagttcttggggtgatggattttcagtttttaaactgggagagtccacggcacactgggacaagtcagccaccatcggtgggagccaggttctgctgggactggggaccatgggaaggagtttgggctgtactttacatgcaatgggagagactgaatgtgttttaagtggcacattctcaactgcattcagtctggagactgaaacactgattccttgttctttggcaagtcacccaacccctcttgacctcgctttcctcacttctagcgagaggtggttacaccagatgatcttcaaggttcctttcgactctgagaccctaggacacttttcactttgttctgtagacagaaaagagtggtcaaggattactgagcaaaggaataacacaaagaattttttgaaggattaatctggcagtagtttacaaaactaatcacagcaaagagagatctgaagaaaacagttgagctcttacagtgatccaagcaagagatgatgagagcctggactggatgacagcagaaaggatgatggagacaggaaggaagggtggagtgatattaaccagaaaaattgctgaatttgctggcaaactgcacatggctgataatggagtcaccaaagtgtgatttaattcattcattcatttgttcaacttactgaggccctattgtgtgccaggcactggatgaaagtagatgagcaagtccttgccttcacagagctcacaatctagtggggaaaccagtatcagactgcacgtttcagttgtgcttaatactatgaaaggactgggccagattccatacaagcgatgcggaggtcctgacccagtctgaagatcactgagggcttactgagatgagtgatgtcaaagctcacagctaaaaaagaaaaaaacagcactaaattaggttgatggtgggaggtgagggtggagcaggccatggagtggagaacattttaggcacaggtaccttatttgctgacaacatgaggcaggaagatgttgcacattcaatgaacttaggaaaacacaacctgatgaaggactagatggaggatcctggaaggctggaaagagttaaattataaaagggacttgcagatgcataattcattttggacgcaattcagagagtgatgggaagtcattaaagaaagagttataaacaagaccctgatgtgcagtttcagagttttgcatttttgtatccggaagaatcatggtattcctaagagaactcgggcttagagagagtggagaggtaaattctgatggaaaagcaaaagaggggaaaggaaaagtgtgaccaagtggaagtagtctctcaggtgctgaagacacaagtctatgagcttagcagagatgagaggtaaagataatgctctggaggccaggcacgatggcccatgcctgtaatcccagcactttgggaggctaaggcgggtgggtcacttgaggtcaggagttcgataccagcctgggcaacatggtgaaaccctgtatctactaaaatacaaaaaaaaaatagcatggtggcgtgtgcgtgtaatcccagctacttgggaggctgaggcaggagaaccatttgaaccctggaggcaaaggttgcagtgagccaagattgtgccactgcactgcagccaggatgacagagtaagactctacctcaaaaaaaaaaaaaaaaagataatactctggggatcatctgtacagttggagctgtgagagtgaattagttttgtttgagaagggagagttagcaaggggagaaaagattgacaagaccagagtcttgggacctgtccacatattaggagcaattctggatgatccagagatagaaaggcaaacagaagggaggacgacccaggaggtttaggcacatcatacacagcagccaagcctgagtcacacagacagggtagtggaggtatcaaatactgcacaaaggtcaaagaaaaacaaagcctgacaaaaggccagtcagtgtggcaattaatagatcattcgttatcgctgaaaaggaggttggtgactaatgtttggattacatcaccttggacaaaattaataacaaatttcctgatagtcacttgcaaagatgcaatggaaattggctgctcactctccctgtctgttctgaaatttcttaactttgtgaacactctaatctcctctgagtactgcagcagaaaattgaaatgtgccctgtgtacaatgtgggtgagtttctgttacccaaatccttaccttttagatgtttagaatgtcaacttctccaatttactgaatgcgtaggcagagtttgcatgactgtttctgagagtgaatctatcggaaaggagggagaatgacatgcgaagagcttctatcaatcacgaatccagctttagactgcaaaatctgtgtgttcacgctaagaaagggagatttcctgaagtcaaagatctaaacccaaaatctaaaaacatatgagtaaagagttttgcacttagggggattactcagaatagagaaaataatgtgggtttaaccatttcatgacagctttttttctattcctttgaatgaacacctagacattttttaaattaaaattttgagtaatacttgttcattgtagaagatttgccaagtccaagaactacagtatgcctgacacctaataaatactcgttaaatatttcttgaaaaaagacatgaaatggtacaagataaaactggattagagggactctggcatatttgggatcatgttaacacttttcgatgtggtctttgagcatggaggaattattataggtttttagtcacaggattacatcataaattatctttgaaaaataccctggctgcattttgctggatgtattggagtagaatgaggatggattcaaggacagcagtgaggtagttactgtgataatcaggtgacaaaaagatggtggcttagactaggctggcagcaatagagatgtagagaagtgggtggattgagatagatttggtggtaaaaatcaatagagcttggctatatggtaaatttagaggtacgctgggaataatggagtgggggaaaattttggtaaaggtaaaaatcgtaattccatttgggaactgttaagtttgatgttcaagagttagggagaagaccattgggtacttatctggatttcaacataatacccaattacatcaatgtcaaagtcctagcaaatagaacataatgaacccctggcagtggacgagcatgtttagggtgagattattgaggaagaaagactaagccctgagaaaggccaatatccaacattgaaaaggaaaaaagtctgcaaaacatgagcttttggagagcgtggaagactatcaacatagggtgattgtcaaaataggaagtaatagagaagagagtgtctcaagagggaaaaagtggttagctctactaactacttttagtagaagtcagtaaggtgcaagttgaaaaaatgcacactggacttaacttggctgagctcctgggtgaacttagtaaaagcattcacagtagaccaatgggaggagaagccagactgggtgggttgaaaaataaatgagagatgagaaatagagacaacagtgtgcatatctcatgcgggttgccagacagtggttaacgtagacagtgacatgttcacactggaagaggttaatctgcagagcaagtgcaaaaccctctcaaatcgctgctatgtttaaggcatcttagcgctacagagacagaataatcctgtgtattgggaatacagaaaggaaaaaatcaggaatgcagagacttcaagtctttagaggccaaattccaaggctttggtctgagccaggcactatttcaaacagctggattatgtgccaatatgcctaacgaagtgaatatcagctggccccacactggtaataaaacgataataactctataaataaatgtattgagtgctgactgtgccctctatcacactagccactctataccctttatctcatttaattttcacaaaagcaccagcagatagctactatagctactagtaacctttttctttttctgttttttttttctttttttttgcagaagagatcctgaggtccacaaaagttgaattatatgtcctaatacacatagcttatgagtgaagccgtgattctgattggtctgactccaaagttcaacttaggttattcagtctcttcaagttgttgttgcccaatgaaaacttgttgcctagctaactggaaatctgactgaatttccagactagctcagcttacctaatttaataaaaaacatcaagacccgaaaagcaattatgtagaatgattcgaatcttaaacgagttaatatatccagagctcttatggtaccagacgcatagagagccttatgtatgtgtttcccattaattcttactaaaaggctctagagagaaattggtctgcccttccctggtgctaatcaaacattgtgaatagtaacaccattttttcctcccaagggccactaaatttctgcttcttacagagtagttttcaacttggtcttaaggaagaggatggtatttcctggctttgtgcttaatctctttacaggaaatgatattgttgtaggcaaggacaaaggtacaagtgtacacatttaacaaatgcattgaatcctctattaacattgcaagtcagttctttagagcaacagtccccaacctttttggcaccagggatcagcttcatggaagacaattttccacggacaaaggtaggggagatggatggtttcaggatgaaagtctttcacctcggatgatcaggcattagttagagtctcctaaggaatgtgcaacctagatccctcgcatacacagttcacaacagggttcgtactcctatgaaaatcgaatgcccctgctgacagaaggcagagtttaggtggtaatgttcgctcgcccaccgctcacctcctgctattcagcctggttcctaacaggccacggacctgtaccggcccgcggcccaggggctggggacacctgctttagagtcgtatcatttttgttgatccagaataacaaagagatgaacagcctaagtccaccagctatgagtttgggattgaatttgacaccagtttaattgaggcagccacggagatcaaggcaaaaataacacttcttaaggtcccactgtgtagtgacaaacattagcttctttaatcttcataatgctgtcggttctgctataatactgcttttaaaacatgttttttagagacaggatctttctctgtcacccaagttagagtgcagtggcatgatcatagctcactgtagcctcaaactgctgggctcaagcagtcctcctgcctcagcctcccaagtatctgggactacaggcatgtgccaccacacccacctgttttttttattatcttattattttttattttgtaaagatgaggtctcgctatgttacccaggctggtcttaaactcctggcatcaagtgatcctgcctcaaactcccaaagtcctgaaattacaagcctgaaccactgtgcccagccaatgcttccttaaaacataattttgctccaaaatggtggatacactttcagcttgacactgagtttgcatttgtgtacgtgtgacttcgtccttgagaaacactgaacacagaaaactgcacccagctgaaccaggccatgtagaaatacacaaaagcaaacacacacatacctcaaacatctactcacttccttcagctggtgtgccacaagccccacccacccatgcacaattgctgttacaacgctgtaggattccaggtaacactcctcccaccacttccaacacccacttccacggctctttattaaggtaaaatacttatttatcacggtgtttataaattttttcaccatttaacctgcataaaacggtgctactgtttgtattaggttcctgcttttttattatatgttactgacaggagctttgttctcccaaacccattttccccgtaagctctgtgggttttattgtgaaatttagaagactgtggtcctttttagaaacacacaaacaccttatattagactgactgtacgtaagtatgaaacaaatatgtttattcttttttttttttttctgagacagagtcttactctgtcgcccaggctggagtgcagtcagatatttttgttcttattcccattccacaaatatgaaaatagcccagaggagatgaataacttacccaaggtcacccgtcactgactttgtatttgtgtaatttcgtcactcccttctcttaacagacacttctaaatagcttcaaagcacattgaactggacagttgttgcaaaccagcttcaacattacaaaaataaacattttccagaaaggccttcactcaagatgacccacacaactctttgaatggtctatgtatttttaaatcatgtggtaatcccctttgtacatactaaataagtcccattctgctcacatgttaataaatttttctcatttgtgagagttgctgaatagagcaagcgaattgttttactcagtaggtggtcgagccataataaagaagcctcgtgattaagtagagttggagcctcttatctttctcactgagtgggaggcaccattagtagtaaaagtaattacctgtgtagaacacgctgattgcatcaagtacctactacacgctactaagatagtcatctccattttagagcttcttaagagatcttcatttgatgttaattttacattttaagccaaagtacattatttttggaaaacattgtcttagctggatgaactcatttttaaagcctttcaaaggacttctgtgccctggtgattccctcaccgatgccctttctccaaaatggcagctgcaaagctgtctaaacaaagttggaaatgataagccacctaaatgtgaaagaatctatctggcaagagttggttttatgtgggggtgaaaaacctgtgctttcatctatgaaatcacaaagtccgttatgggaaggtgttggctatttaaagcagtaattcctgagaaactgtccatgccaaatcttgttaaatgttgtactggatagtttcagcaaatttcaaattcttctctgatgggaatattagaaacagggtgctcctggttagatggaggcaaggccagagccttgacacttagtggtggtaactcagaaagagtcctcagcagaggggttttggaggccagaggactcccccagctctgtctttggctgacaaaatgaccactacttgcaacctaaccttctgtgtataaaatgaacagattgaataggtgtcccatctaagtccaaattttgatgtaggtatacagctaatcatttattagatttattagaattctttatgtgtgtgcatttacagttaggcatctgtgcaatcgtccaaccaatgaatcacaccatgcctttgagttttccaattctcccttaaatgtagctatcaatgttatttttacttataggaccccaaaatgtgaccttccttagggaggtaaataagacattgcttgtaggcctgacttgaggcttgtaaatagctttccaaattaataggtctgcaaaaatatattctgaagcctcacatttctatcggttttaaccgtatagccagggtcggtgatccttttttcgccatatctacttctttcatattgctgatcacatcggaaagccaaaaaaggactatcagatatgatcaggttacctgataaaaagaacaaacagttttcgaagtcagacagactggttcaaatcctgtttctgtttattcaggctcaaaccttagtctgtcattgttaccagctgtgagacattctgcaaattatttaactaattgaagtatcagtttcctcatctataaattgggcatgacagtaatatttgcttcaccgttataaagactaaaagcaaatgagatagtatggaattctgtttctgtttttactggaaggaattataaaaatttccagtttgcattgataacttgaagagggaatgtctattttttttataagttttcttccctttctatgtgaatttttttaactgtaagcatttattgcattttttttacttctgtcttttaacatcatttgatttatcttgggtaaaatcataagccttctttattattgtttaagtttctctgatttaaaaaaactaaaatattattaaaaattaaataagataacatagctaaggtatttttcataatgtttgccacagaatagccactaatcaaatttgtcataagtaataagatcacttccataactacaaaaattttataacccaggaaaagtaaagaacgacaaaatacacagcaattactcaaaagatttttcattccacttattctggttaatttcaggtcctggaatcaagaacaagtgtttatatatcggttaaattgttttataatgaattttgaagaacccttggaattatttttgtgttggaattatattgtattaaagagtgtttgaagcaatttggatattcaagtggacttagttttgtcggggttttttccactaagatttttcactgtttgggcattatttaagattcagcccaacaatatgtcactagctaaaactgaatgatgctgtaatccatacagaggacaaatgacaaatttgttgactaaacttctatcagtttggttagtgaggagcattctgattataggtgggaatttttgagcaagattgactcttaatttcatgttcaatttttaaaaatttattcatcctttcctctgtttttcttcctttccaaccaaacttcctccctccctccctccctctctccctctctccttctctccttctctccctccctccctccctccctctctccctctctccctctctccttccctccctcccttccttccttccttctttggttaagcacctattctgtattttaaaaccagtagtcaagctcagttcatacttttttatgcaagtgcctttcaccaagacaaaaaccaaggcttgaactaacatttagcttttctgaaagcaatttactgagaaagtaagatgcttgggttttttctgtgtagacattaataatcatttattagattgttaggcctatttcaagccatgtaacctcactgggtctcagtttgctttcctccaaaatgggataataatacctgctttatcatatacatgaagaatttagtcctgtgctagctcatggtgcatttgttaaataagaaaaatagatgctgggtgtggtggctcacgactgtaatcccaatactttgggaggctgagatgggtggatcacctgaagtctcctgacttcgagaccagccaggcgaatatggtgaaacctcatctctactaaaaatacaaaaaaatcagccgggcgtggtggcgggcacctataatcccagctactcgggaggctgaggctggagaatcgcttgaatccagggggcggaggtcgcagtgagccaagatcgcgccactgaactccagcctgggcaacacaatgaaactccatctcaaaaagaaagagagagagagagagagaaagaaagaaagaccgatatttcactttaggtagaacttttgcatgtcttggagaatctgaaatatgaccaggctgtcagtggggaaacacaccgaggagaaactgcatagtggtagtggcttggttcctaaagtaagacaaactcaggtgttcaatgctgttatttattgaacacttatttacatgccaggccccttgtcaattactttgtatgcattgtacactaggtgttattttattattcccattttacacataaggaaatgaaggcccctgaaagagggcaaggactttccccaggataaattacaaagttcagatttaaacccaggtggtctagacctcatgatcttaaacactatgcccccaggattcagggccagaaaggtgcctagctgcaaagtcatgcccattactgagttcaacttcctcaaattccccctgaagtaatcccacgcagggctcagtggtggcgttcaggcgtaagcattaaaccacaagccaggcagaccttcatgagggcttctcaaagttctcctctccagctgcgctcaacctcacctgtgcctctcaaggcctagggttattgtgcatgtggcatggtctccagctgttcctcatcctgacttctccatctgcaccaatctctttgcatggaggccgtgtcttctggtctcttggtagctcagtagtggtggggtgggtgccagctgcccactgtgcatctcaatcaaggtttctttagttgtaaggaagaataactctcttcaaaggaaactaagcaataacaactaaacagtaacaacaaaaatgtctaaggagggcgctggcatagaccagggaattgatgcaaaggtggggttgagtgggatgtcggagagggtagagccaggtatctttatgaaccaaaaggtatatgtgttttgcaccttccttcagactttccttctctcaagatcgccatatctccattcagatttttgggctaatctctaccaaaagcttggctctctgtgggtagcctactttcagtccatttgtctctgattgaggtggagtctgttagggcttgaggagcaagtagttcttgtggaagggaaggtatggcttgaatagatcatccccaagtgtgtctaccacattggttctttggaaggtgattgttggagaaacctcctgtcaggaatgatgtatatagggcaaataacaacctctccctggtggccttaaccataaaatagaagtatggacagctctgttcatcctaacaattatttataggccacctcaatttgcctctgttaactggaactcgtgtcctgaaaccgtgtcttccctttgcacagttctgtggttgctgagatggcatgcaccataaggagtgtctgcatttaagacttatcttttaatgccagttctccttccaggagctggggatatagcaatgaaccaatcaaatgttcttgcctaagaattcaggtaagggagaaggaaaataaaaaatgaatatattagctagctggcatgttagacgtgaaatgctaaggagaaaacaaagccaagaagatggtagaggaagagtcaggggatggggtggagggtttcatgctagataggatggccaagcatggctctgcggagaaaggaacctatgagtagactcataggaagtgagaaaacaagccatgtgatgatctgaaggaggagaattcataataccagattctcacatggctagaccttttgccctttcttgagcaacagcctgtcatgaatggagagaagaattgaggtcaaccaaaaaagggaaatttttttgcccaggatcagatgcttttccaagtaaacaagtagttactccaagggatatttccaggagattcttcaactccaaaggccaaatcttcacgtttccgttactgtagagctttctaaacacagataattgtttgcacagttggtcagctcacacaaatcccttggcagtttctacagacatttatgcattacacattttcgatccttggcccaaagttctgatgttttagctctgacagtcggctcatgagaactcagacttcttgatgcaagcccccagtcttcacttttgaaagaccatggaccaaagttttaattgcctcgtgggtgtctcttcctcttcactgggtgcacagcgttactcataatcatgcttctgatttgtgtctgttaaaagaaggatcagaaacagactggcaaggtcttacagttcttggtaaaactcttggaaaagactttcttttttgatttgcttgtgtattttagtggtgtcttcaggctatttagagaaaagtagtatgtctattgattcggccattggcagggacttaaatgatggtacgtgttggctgtgtagtacctctgcttcttctagttggattaaatccaaggacaggtaaattcttttggcatttggcttgaccagagactttgtatctgccatattggtaattggccaccttggtgatttttggactaatgctccagggagagaaactaaataactctctcctccaaccttttcccaagcagttctctctacctggcattattttttaaaattgacttaagctttgccccctcttggaagcattctattaccccatgtctgtcttcaagatgaattcagcttcctgctctgttgtcccataagtatcctgggcatagttctgctctgggactcatcacctattgctgaaatccttttgttttcttacctgtttcctactgaacagagagcttcttgaggtccagcactggggcttaatttgattcatttagtaagtttttgttgggaacttactatatatgaagcactggattcaactctgggaactcaaaagtgaacagaatgtacacaattctgctctcatggaatttatagtctactggagttagacagacattttaaaaaattatcatacaggaaattgcaatgagtaattttgttgggtactatggagggaaatcctttaagggccctgtttgtttctgactttaaagcactagcaacaaattggcattaactgattatgtgatttgaatggaattgaggatctcagcgttggccctccgtcctgctgttgtcaactctcccaagtttttaaatgccaagttgtagttgcctttgttccgctaaattgaaaaatttaccccgtgcaaatgaataactaaattcatatttttttgaagaattctatctaaatggagatttgatggctttcagaaacctttaaaacttccctttcccccatatgaattccactatggattgacatatggcatattttcaatgtctagtttttgtaattaattgaaggctcactctgtctgagaaagagagtgctttggcatttccgagacctgtggattccatccagagtaccacacagcaatgcagagactccactgccgctcacctagctaggaggctgcagctctgtttgtgaaatgttgctattcagctttcaagtttattgggagcactgagttccaaggatagcaattaggttgttctgcattcttcggctggctcaggatgcacgtgctgagactgcacatcatagcaacggctccttgactgccagggagaacagtgtgaaagctttccgtggctcatctcaaccacctcctcctcgcccctggcgctccgcaatcctctctactccttggtgatacctttttaaatctccccattatgttcaacagcatgtcagctgagagttcaggcttacgagatcatgtccaataggccaaagtgtcgaaaataaatgttagctcataaaacatacgtggcacatctatagggcctgaggaaagcccacacagagaaaaaaatcttaagtgaacttgtttaacccagcagtgacaggtacaggaatgggattttctttttttttttttttttttttattaaacagagtttttccaacttccaggctggcaaagaagttgtaaagggaatgtacattttgcaccgtaatagaaagagataagtagggatttttccaagatttggaaagctggtcttcgtaagtccatttatttattcaacaaaaactttatgaagtatctattacatgccaggcactgtacttggcatttgggataacatagtgactgagaaaagatttgcccttgagaaaaatcacagcccctttggagggactgacattaaccatttaatcacataaatatgatttttcacacagtaataatagctatgaagattaaaaagctagatcataagatacgtggctataagagaactccctgatagggtgacattttagataagtctcaaagggtgagaataaactgtctacatgaagaacaagaaaagaacctttcagtcaaaggaaatagcaagtgcccagaccctactgaggaaggcctggggagcgcccaagaatcctgtgttaatcagggttctccagagggacagaactaataggatagatgtatatatcaagaggagtttattaggagaattgactcacaattgcaaggtgaagtcccacaataggccatctgcaagctgaggagcaaagaaatcagtccaaatccctaaacctcaaaagtagggaagctgacagtgcagtcttcagtttgtggccgaaggcccaagagcccctggcaaacaagtgttgtaagtctaagagtccaaaagctgaagaacttggagtctgatgtttgagagcaggaagcatccagcacaggagaaagatgaaggccagaggactcagcaaatctgctctttccatcttctcctgcctgctttattgtagctgtgctggcagctgactagatggtgcccacccagactgagggtgggtctgcctctcccacaccactgactccaatgttaatctcctttgtcaacaccctcacagacacccccagaaacaatacttggcgtccttcaattcaatcaaatcgacactcaatattaactgtcacaaatacgaaggagaccattctgactggggttgagaatagggtggagagagtcagggcatgaagccatgggggaataggtttgctggaatttgaaagccatgagacagagtgaggagttccttccaattgaaagattttaagcagcagaattcagacatgaactttggctgggtttggaatggagtgcacctctgtaagactgaggtgcaccatttccccgtctgccaaaatggagcagctgacagcagcttgcttgcaagggtctccgagcccacaagcccaggtgtgctttgaggtggcttcctcagcatcttaagataactcacagcaattattttgctgtggatttgcagaataaacaaaggcttcatcgagcctctggtttgaggtaataagtcactaatgctgtgtgtgcacactcctaagcttcaagcctgtgtggattctttcttcaattttactccccttttcgtttgctgttttgtttccaatatgtcatgtttccatataacaaaacacgcatacagacttgataccatttaatatttaattcaaataataaaatacttaccatatcagataaaatgtttacatgtatgaatgtttatattccctcaggagtgtgttttggaggatgggtgaaactctgatagcacacagtggcattttaagtggtacacagataaacttcctaacaatttaattgtaatgtatttattttaaggtgtaatacttgtgtaaaatgaggaccacatcaatttggtaattttgtagctattatcgctagattgccaatgtcagttgtgatagaaaatacactgttcaaattcatttacttaagaagtgagtttatgtaaagcctggatagtagtgcaggagatagttctataacggcaacattggtgaaagaagtacatctatgctgagcattataaaacacagtcccttgaaagggattgtgtagtcatcagccacttctctaggtttgtatgccgctcccggttttcactggatgtgggttgcctgctgagcttccagcaaagctacagattcaagttgctttgctgaaaatatagcttaaataatttgtaagatttacctactacttaaatccttcatttatattctgattttgctcattaaaatttgcaatatgattgtattttatatgcaaagccatactatttcttggtagatccatttattcccttaccttagatttttgaagatgcaaaagtatcacgacttcctgtccaaaaggaaatgaggcactgttgatgccaatgcagcatttatacttaatgtagagaaagcactccattatagtgtacttcagaaattcagagagtgtgctaaaaacccgtgcttctggtcagcctcagtggctcacgcctgtaatcccagtactttgggaggcagagagattggaggatcactagaacccagaagttcaagactagcctgggcaacataacaagagcctgtctctactaaaaataaaaataaattagctagacatggtggtacccgcctgttgtaccagctactagagaggctgacaagggtggattgctggagcccaggagttcaaggttgcagtgagccatgattgcaccactgtattacaacctgggtgacaaagcaaggccctgtctcaaaaatataacaacaaaaccgatgcttttgtttgtttcccagaggagggttttggaagaaactactgacacagcatgtgacagcaagcatcacactcacaatatcgtttccttgtgtgaccgctcccatcaattagaattgacatcagttccaatcctatactttatagccctatacgagagaccttagtagaattggaaaccaacctagttaccattctgtgttgtcacatcccttttttaatgtgtaaactgagtcaagtgtcgactgaagcttcagccagaattcaatgccaggattcattctccgtcttaacactagccaccagatgatgttttatcagtcaacttgagtcttctcatattacccgttgactgtgttctgtttgacaaagaagctgtgtgggttgctagtatatttttccctcaagaccacctaacaaacacggcattacttgtgggataaatgttagccatgggaaaaggaaacaatattccctggtatgctgctcattgtcacatgctatgtctttagtttcttctgaaacccttcttggaaacatttctctcccagttgtaatttgtatattgctgcatcttttgaaaaattattttgaagtcttaagataaaatactacatgagaacggagtgggaaaggatctaagaagcagttgtaaaaataacattctgggacagtggcactcatggtaaagtatctttgttgcatcacgtttgttttggacattctgctggctagaaagagtagcatagaccacggattggcaaactttttctgtaaaagggcagtggatatatatgttcagctttgcaggtcatatagtctctgcagtacctactcagctggaaagcagctatagactaggtaaacaaatggccaggattgtttcccaataaatcttatttacaaaacaagcggtgagccggatatggccctgggactgtagtttgccctgtgctagggagcacagaagagatgcatttgactcttagaaatatacagacctgagccacatcctggctctgatacttaccagctgtgggtgcctggccatctgaaagcatttctcagctcatcagtttctacttaagtaaaatgggaccaattatacaacccctctgatgggttattgggagaatctaacgaggaatgctcagtgatgaacacagacctgacccagtaagcacacatccaatgttagatgctactgtggctgctgtgttgccgtggctgctgggttggaagccctgctccactcttccccctccagtctgttgcccatagggaaggaagagtaaccttaacatggaaattgacccaagtgtcttttctgcttaaagcctttccgtggtttcccacgcctttcactatggcctgatctagctcatgcttccttttccaacatggtggtgctgctctccttcactctcgctgggtgggctccagccatactgaagcagtgcatggagctcttttgtgccttgggacatttacatgccactttcttttccagaatgttctttctttggcttttctaatggctggtgtcttctcattcattatgtgtttgcttagatgttacttcctcagagaagtctttatcattctcttaccataactattttctcataactctcagcaaaattcatcaagaaccgtgcctgtcttattcacagttgaaatcacagtgctttgtacagtgttctggcacataatagacactcaataaacacatgctaaaaataagtgatttaatgatttatgatgataatcattatcatcatgaataaatctgaaagcataggacctcagccgggtttcatcagacttcaaccgtcttcaaactacttcatgatttttaccttatctaggtaccacttttgttacaaatatttacaattttttactcccttttttgacttagtttttttttttttttttaaataaaccagggattgacaaactacagcctcagggccaaatttggccctccgcctttttttgtaagtaaagttttattggaatacagccatgcccatttattactgtatcgtctgcagatgctttcaccctatagtggcaaagttagatagttgagtagagactgtctggcctgcaaatcaggaaatatttactgcctgattctttacagaaaacatttgccaactactgtactaagtcataaaaaccaccaaatcccatgtttgatacgctagttatgtttttgttttcattttcattaaaaacaatcttgtaactattatgattttaaaaaatgatttacttaagggcccactaaaaacatcttgtctgccatctctggtatatgagccacactttgggaaccagagccacagtagtctttaaacttcatcagtgacattctacacctgggtgaaagtccaatatgtgggtccctgactcggtgcaagttagaacattttcccctccagagatcctttagtgactacttcattttgggaagtgcgattttcaaatttacccaatggtaaactcatgggcctttctccccacggtgcagtacatctgcctggcgtactcttgctaaccttccacacagcgtgctgagagtctgatgtgaacatctgcatcatggatgtcattataacaggtgtcaaaaatgctactatgcccccagaacacctagactcttcacaagatagatgaaacctatggctctctgtacctgtgcttccagaaatcaggactgatggatttttctcatattatgaatagccagtggctgttctgttagatggccctttgtaaagaaaattctgcctcccagaagtttccccagatttacctgttgcattatgaaatctcctgtaaataatgcagagaaatttgcagatgccttcttatttttgtttttcaatgaaaatcatttcaggtaatgaaagttatgacctcaaagtgaaaggtgtataaggtaagcctcttccaattacagcaggcagaaaacccaacgcaaaatggctcagacaatcaggcaatttgctggctcacgcaactcaaaagtctaggacaagctggcttcaggtactgctggttcaagccattaaattacatcacaaaggtttggtttctctctatatatttctctgggtcacttttgctatgttggctctatcctgaggcagtctctctcctcgtggtaaccaggtggctctagcagcctcagctttatatctctcaagagtaagtccaccgtcacagagctggcctctgtctcagaagttctaggcaatatctcatgatatcaaattgggtgtgcttgtgccaggctcaaccaagagaaatgggatgtgctgataagtcacatttaggacatgcgacagctggagctggggatggagctagccagccccctgagaatcacatggactctaaatggggatctcaaagcaagatgataagatattattagaagcagcatgaataggtggcagggaacaacaacagcagcaacaataataaatttctgttacataaaaagccagcttgctccccaaggcttgattttccatttcaccttctactgcaggattttcaacctaagcactcttgacatttagggccagataattcttcgttatggggctgtctcgtgaactgtaaaatctttagcaacatccctggcctctacccctgtgatgccagtggcatctccttcttaccccccaccccagttctgactaccaaaaatgtcctctgggagccaaaacggcccccagttgagaaccactgcctactgttacaagtggaaagtggggagcagaggattatcacctcacaattcaccagggaaataatactaaagggggaaagagccactcctagggctgggcttgacaacatttcagcattgggtttgaagccttcattttactctctttctccaatgaacctggggaaggttgtcagaaccccaaagggcccagccaatcctatcagcagaagcaattgtagtctagggtttaaggatcctagggtcaggaagttctaggtctccctcctgttaacactaacacctctgtgttttttgtttgtctgtttgtttgtttgtttttagagacagagtctcactctgttgcacaggctggagtgcagtgctgcaatctcggctcactgcaacctctgcctcttggattcaagtgattctcttgtttcagcctcccaaatagctgagactacaggcgtgcaccaccacgcctggctaattttttgtattattagtagagacggggtttcaccatgtcggccaagctggtctcgaactcctgagctcaagtgatccactcgcctaagcctcccaaagtgctgggattacaggcgcgagccaccatgcccggcctgtattgttttttagtacaggtgtgagatttcagtgattataaatgacaactatttagcaaaggggcaggcgtgagatgatcactcaataaatatgagctctaattttgtatgtcattatcataagcatcatcatcatcatttaaaccaggttttctcggccaggcgcggtggctcactcctgtaatcctagcactttgggaggccgaggggggtggatcacctgaggtaaggagtccaacactagcctggccaacatggtgaaactcgtctctactaaaaatacaaaacttagctgggcgtggttgtgggcacctgtaatcccagctgctcaggaggctgaggcaggagaatcgcttgaaatcgggaggcagaggtagcagtgaggtgagatcctgccactgcactccagcctgggagataagagtgaaactccattaaaacaaacaaaaaaacccaaaaaccaaaaaaaacaaaaaacaaaacaaaaacaaaaaacaaaaaacaaaaaaaaacaacaaaaaacaagttttgtcaagctcaatggtattgacatcatttgggggcagacaattctctattgcagaggactgtcctgtgtgtggtaggatgtgtagcatccccaacatccgcactgtagatgtcagtagaactctcagttgtgtcaatcaaaaatgtctccagatattgccaaacatcccctgggacaaggagggggatgggatgagggacagggtgggaacaaaactgcctctgattgagaaccattgagttaaacccactcaggggacagaatgaccatctggcacagtaataattctcttgctatgttttattccccagagctggtcccatgattttcccaataaaaataagaaggtacttcccaacctgcttaagaaaatgtttgaggtatcaaggccagatataatacccagatgactgttattagcaactctgatttcctgatgcagagatggggaaagcattcccatctcctttggcctttatgtctcagaaatgctgtctcaagactcctagatcacacttgttctatttccagtttcaatctggcccaggggatccatgcagcaaatccagttagttacttaaaatgtgtcttaatatttggcaaccagatggaaaatcattgctccaaaccttggcctgcatgttctaatgaaaatgcttgttagatttaatgaaaaccagatgtgaggacgatctggctgtgacatctgtcaccccattgattgccagggttgatttggctgatctggctggctaggcgggtgtccccttcctccttcaccactccatgtgtgtccctcccgaagctgcaagctcagctgaagaggatgaccatcccctatagagcaggacaggtctttggtcaagggtattcgagtagctatgctcccctgctagaacctccaacatgctctcaaggtccattagatttaatgaaagccataggccagaccatgaatagtgtggcgttttagatacacaagaatggatatgcagaaatatggtattgctgatgatgtggatgtgtacaatgaggacctttagttttcctatgtttgcctgacactgaggtttcttgtgatcagtgagaagctaagtctgatttggagtctggtaaactcggctcccaccattctccattcaaaatcagcagaatattgtggttacgagcatagcatttggagccagacaaacttcaatggctacttagcagctatgtgtggctggcacatcactggtactcaataaatactggttgactgttgaatattgcccagcctcagcgataataatgcataatgcttagtttattcatcttgagataaaaacaatgtctatgtctggggtagtaaattagataatctttgtaaaacatttagcacaaaggaaacagtcaaaaaattatagttaccatatgtaacagatgtacgagattcacagccattttgttcattctttattcattattcaactcatttttatttagtgcttactttgtgtactgtcctagcaattagtaagtcaacaactaaagagacctaaatgagcaattgcatactgttttctagttaataatactgcaaatgtttaatgtgtagaatttttttggtcccatttgaatccactgtgtgatgaattatcacaaaaaaatgaactgtctccaattatttaactttctcaaaaattagctagaaattcaggggggaatttccctctcagttcctgccacatctccacagcattcaataatactttttaattttcaaaaagaagtgaagtttccaggcaaggcactgacaagtaagtttaatggaatttattgcagacttattcctgatctatcccaagagtcccttgatttatttagtttatcctataacataagaacatgggctacatggatgaggaatgcagtcttaaggccagggttgtggttttctgtatccttctgtatctttggatggttacaattccctctcttagcatattttcatatggttaagtcttagcgtgattccattgccaatgagtctttgcctaggtgcttggaccacctttgatgccatcttgtggtcctacatataattctagtctccatagtgaatgaatggtgacctcccccaccacctcccagctcagcctaagaggtaatggaatgatcttctattgactaggcaccagcaaggaagaaagaagacccaaacaggtgcaggtcctttgagcgagggtcaggtgtgaaggatgcagctgcattcctcaaaggcaagttcttcacagaagcttatctggaatgtcccaattctcaatttaatagtaaaagtcataaaccctattattattatcatctagtgcttgtagagggccttccctgttgccattctcttgtcttagagtagtctacaaggtccagcttagactcgacttcttgcagaaagcctccacaatctctcacatctgaaataaaaatggtccctctctgatcatttgctacaacctgtttcttcacaatacttcttactgcctgaacatatcatgcacatttttgtttacttattgtattagtctgttttcacgctgctgataaagacaaacccaagactgggtaatttataaagaaaaagaggtttaatggactcatagttccacttggccagggaggcctcacaatcatggcggaaggcgaaaggcatgtcttacatggcagccggcaagaaagaatgagagccaagtgaaagaggaaaccccttataaaaacatctgatcttgtgagacctattcactactacgacaagagtatgggggaaactgcccccatgattcaattgtctctgacaaagtccctcccacaacacatgggaattatgggagctacaattcaagaggagatttgggtggggacacagccaaaccatatcacttatttattgttattacttctcctctacacactaacctggtcctatcatgataatggggatctgtctgcagcagcagtgaagggggaatggaaggaatccactttttgccaagtgaataagcaagtactcagtgccaggggctgggctgaggccactgctgaatactggctgttggtggtgattcagtggctaagatttgaccccaaaccaccactggatgcatgttatcattaatcctggagactcactgagattagttaacttgcttgagatcccacagagagtaaaagatggagccttgatttgcactcgtggactctgattctgtgcctgctttcttaacctatttgcaaacggcctcaacctcactttgccccttcatttctaacaagggaagttcctttgccttcccgttttccaggtcattgcccaggtcctaacccacctgtctggttttgcaaaagtctaaacccctcgttggctgtggctttctttcccccattaatattcagagctcaagttgcatcaaatggttaaaaaataaagtgcatattattaaacttttcaataatggagtcactttaatgttgggaaattctaccacaggataatgctttttggcaagctcctgttttagcaggaagcctgcagtgaaggtatgcagagagagagagtgagggggcatctgtttgctgtcagtttctctgacagctctgtttgtgtcaacgttcccaaggatggtaactatgatttcacaaaagggtcaaagcccatcaaacctttttgcctgctgtggtcccacccccaacccttctctcctgcctctttgtcccttctaaattaaatcacattccactgccttttattgaacaacctctggacaaaatactcttccacacactcctcgcttaaggcaaagtaattggaacagaaagtgctactggccaagagccaccaactaattgctttatgcccaactcccctcgccagaggcacacccagcattgacaaatccatggctgtttcccagttttttgaggtttctgaaacaattggtccaatcttaatagtggggcaggtgggggagagatgcaaagcaggggtaggggtgggagaaaatgaattctctgtagtcattagtaccttttacctggtctgtttaatctcctattattttgatcatggatatctggttttttaatttcctgtaatccagcaaggaatgccgttctaaggacatctgtggtctctgctttttcatgttccaaaaatcctaaaagagatgttttgtcaatgactggatatttcattagaaatccaaagattcccattaacttgaattattttcatagctctgatcaacttttaggttaataatacatgatatttaataacctgttcagatcgtcaccaaaattattgatttaataatatttggtcattaataatgaaaaaggaggggggagtgatagttcctatcacttacgtcaatttattccttattgcgttgcaaatctcagggaaaaccaatcattgtagcaacttttaatatcccaccgtcgttcttggtagaagccaggaaaatgttctgcattttaaaatgtctgtattcttaagtttaaagaataaatacaatgaaggcatctgtttaatccaaccattcttgatttcagaactttccgacagtttgtagaaaccacagcccccactcctcctgggttctctagcacatctcaattggctttcttcctcttttttattatattctattgagtcacattgtaatcaccttttgtggttctttgctaatatactttgaaatttgaaacaagaattgagctgaaaagttcatcatcaatttattttggcaacatgaaggttcaaatagttttcctgtagaggtcgtattggtgatggggttaaagtgagcatttcatcttatatgaaaaaaagtagaagtcacatgtatgaaccagatgtgtaaatattgattactattttgaagttatcacattttatttccaactttaaaatcacttttttggggagcgtcttttgaaatttgtcctcattgttggaatatccctatgaggacttttttttaatttggtaacaataaataagtctcttggctgacttccaagaagaacctacattatttcaaattctattcaatacttaatggtgttatggcaaatttccagcacctaactttccaggcaatgagaaatttccctctagaattgtattttgatggaaactgatttcctgtattggataaataatggacaatatgtacgcaactttagctcaagaaacatcatcagatttcccccaacctgaggccttctctgcacatgccagaacatctgcaggaaaaaagtgcctggggcaggtacagggtcactgtgtctacacagtgctagagcatctgtatatttgaaaacattcagacaattaactctatttttcactttttgtcacatagacccagtttgagtttaacgaaaaaaaaagaaaagaaagaaaggaaagggaaagaaaaggagaggaggtgggggaagagaggagaggggagggaagaagaggggagaggaggggagaggaaggaagaagaggggaggggaggaaaaaggaatactcttaataagaccgtaaagagtgaagggtgcaatttacggagagtagaaacaacctttgcaaaactcaaacggtgtccataacatctcagctgaaaatatgttttgggttctacaatagtgattctaaatcctgctataacacaaatacttcataatcaacctccccccatcttgtttaatatttaatatgtaaaaaagttattatggtagaacggaagaatatgacttggattttgagttgagcagctcatgtagtttaggagagggcattgtttttcaaattgtggatcaaggcccattagtacaatgaattttgtggattatgaccagcatctttcttttttttttttattatactttaagttttagggtacatgtgcccattgtgcaggttagttacatatgtatacatgtgccatgctggtgcgctgcacccactaggatagattagaatacatttgagtaccttgcatgtagcaagggaagtaaaattgtttaattgactgtttctttataacatatgagcgcacgtgtactgggtcacaatatcaaatgtgttttttactataggtcaattacaaagaaaaaaagttctaaagccctggtgtagaaggaacagtttctcatattcaggggtagaaagaagtaacataaaagctaatatgcaagaattatacctcccaagtatattgaaaaaacataatcttttgttggtttcattttcctgtatccgagcaaaaatgggtatcttttggttctacttctctctttatttctcaaatgctcagcagacagcaaagtccccaggggtttcttagacaaacaacctctgatggtatgtttaaaggagagtctaatttcacaaaattaaaataagccaactacctaatacatatgtgtgcattgattgcttttatttaggaaagacaaaatgtcattccaaaactagaagaaattgtttggggggaaatattttgtctaatttgtagggaaagcagagagagtgcttcagcttggttttgaaacaggaatggaagtatagaataacttcagttaccaacatttttaataacagagaaaaatcatctcacttctccattctgccactataatttcaggcccacaggtaggttgacctgacatctgggaagtgtgacttgcccctcaccatttcagttacagggcatatttgctgtttatacgaagctggtggctctcagtatcatggcctttcaggtgcagattttgatgctccatgatgaatctggctcttgccacacctggattttaatattcattgttaacttgaggagctgccgcaggtgggacaagatttcattatgagctctttgaacttataccagttatagaagtggagaaatagatttcacccaagaacatttttaatgttatgtcagagcccaattgatctgatggacttttaatgacttcagtgataataagagagatcatgacttagacccgcttcagccagtgtggaaaggttgctggcaatttgcatggtctgatgagatctgaagtgggaggaaatggacatctgagttctaagacatcgcgctctgcagaggtgccatgatctgctggctgctggggacattgaccactgggcacgcgtgctgtgaattctgcatgcctcaagtcacctgaatacatcagcaaaagtcataacctatcaagaaagcaggcagactggggggtggggggaaggtgggagggttggactcacccacagacaccggaagacctgaaagaatgctgaataaaggaggagtggcgaaagagaggaagaaagtttccccactgttagaggccatttaggctgcttaagagcactaggagcaatccagagaaagtacttttcacttgcattttaagcaaataggaggtttagcaggatattatcacctggagagcacagtaatgggtaattgagtagggaaagggactgtgcatttctgattaatatttaccaaagtctttgtgtgttttttccttaaatgttaatgatgtgacagatccgactgaagaaaaaggacactgtggttgggaatatggtactgtgcccatcaaattctgcctcctctatgcttggcttatgatgaataccattctttaatagcaaactggtgttcgtgaagaacttattacggaggctaagagaaaaccaagaatgaaggaatgcccgcctggcagtgatcaatcaccccctcttaaagatgaaccgatccttctgttttaaagtaacagttcttacgaaggtctcaaacataaatatgcaaggcatcgaagcaattaccgttgccccatcctattcatgtttctgtgcatgtttgaggagaaggtgaagatggcgcccacctttcccgggagagttttcttctaggagaaaggagctgaggctcttctccagataaggcttcctattaaatggaggttaattattagtaccagcagcataataatatcctaatgccaaaggacgaagtcacatttggttagagatttctgcattcctagatgcagtagtcaaaagagagtcactcccaagagagctagctaaggaagccatgcttgagaactaaggaacacgagagtctgtcttcagagccaagatgccccagacccggaactcatttcgtggccacgtgaaatttgcaatgcctttttcagtttacccctgactttatcatttcttgctcaaaaatctttaaagcaagatttctccacttcctttaccttggcactgctgacattaggagctagatgattcttctgagaggggctgtcctgtgattgtagaatgtttagcggcatcccaggcctctccccagtggatgctggtagcagcccctttaatagtggtgataattaaactgctttcagatattgccaaatgtctcttgagcggtaaaatctccccctgttgacaacaatgactttaaagataacttggcgccttcagaaaagtttaatcttttctgaatgcccaaaggccttgatctcatctcctttaacctccacttatcattcactgataccaatcccatagagttctctctctttttttaagttatattttattttatttttatttttatttattaattttttgaaacagggacttacagggtggcccaggctggagtgcagtggtgcaatcacaccccactatagcttcaacctcctgggctcaagccattctcccacctcagcctcctgagtagctgggactgcaggcacaccccaccatgctcagctaatttttatattttttgtagagctagggttttgccatgttgcacgggctggtctcgaacgatcctgggctcaaacaatctgcccacctcagcatcccaaagtgctggcattccaggcatgagccaccgcacccagccttattttatttttaattggcaaataataattgtacatatttatggggtacgatgtgacgctttgatacatgtatacattgtggaattatcaaatacaagtgtttagcatatccatcatctcaaatctttaatattgtgggaggagaacctttcaaatcttctattggctattctgaaatataaaacatattattattaattgcagtcatcttcctgtgcaatagaacaccagaacttttttctcctatctaactgtaattttgtacccattgactgaggtctccctgatcctcccacgctccagcctcttataaccacctttttactcgcttttactttttttagatttcacatataagtgaggtcatactgtatttgtctctctgagcctggcttatgtcacttaccataaattatttcctctagggccttctcacactttctttttttttttttttttttttttttttttttgagacggagtcttgctctgtctcccaagctggagtgcagtggcacgatcttggctcacttcaagctccacctcccaggttcacgccattctcctgcctcagcctcctgagtagctgggactacaggcgcccgccaccatgcccagctaattttttgtatttttagtagagatggggtttcaccatgttagccaggagggtctccatctcctgacctcatgatccgccggcctcccaaagtgctgggattacaggcgtgagccaccacgcagggcatttttttttgttttttttttgacacagagtccctctgtggcccaggctagggtgcagtggcactatcttggctcaatgcaacctccacctcccaggttcaagcgattctccagcctcagcctcccaagtagctgggactacaggcatgcaccaccacgcccagctaatttttgtatttttagtagagacggagtttcaccttattggccggggtgatcttgaactcctgacctcaagtgatccgcccacctcggcctcccaaagtcctgggattacaggcgtgagccaccgcgcctggcccttctcacactttctaaaatgctccaggagcaagccctctgcctgtatctttcccgttgctgtttccttttaggcccagttcactgtagggtcctggtgcccagaacaggccctagaatatggacatgcagatgacttgaccttctcccacagccctgcatctgccaaaattccctctcccttcaagccatagcccagtgggttctttggcagaaggcttcaagtctatcatcatggttgagaacataaactctggagctatcctgagcttaatttctcctcctcaacctgccagccatgtgattggcaagttactgcaacttctctgtgcctcagtttcctcatctataaaacagatatcatagtggagtccatgagggcctcagagggctagtgtgagaatttgtgaaaaaagcatctgtcacgtaacaaaagcagcaccacctcgcctctgtttgccataagcagcacctcctaacctgaagccttctctatgggagaggtttgaacatccatctcagttttcttgtagcatattttcattgactacattttctgagccaaaatcaggacatggtgtgtaatagcatctaggacaagggtccagaggtctgaaatatgagcagcctgaaaacctgtggagagtagttgtcataattatagttcattcccatgtgtgtgcatacacgtgggtgccgcacgtatcttcccaacaggtcatgggtgggagaccgtatcttcatgtctgttccatgtgcagaagtattaatagagtagggagagtgtagggggcccctgtggaatatttgttgatttgaattcttctaatttaatgaaaggagagcctctttcagaaactcctctttctttctggctccccaagtccttcagttaagaaagagatgatcttttgcaccctctaatttcttaaaggcaggtcctgcacttcttaccagaacaattcagggtaagatttgttatttgtcagaacttgtggaacaatgttttgttttgtttttaatttttctaaacataatctctcttccccatggggagcttgattaaaatgtagatttctaggcttcagtttagacttaccaaattagaaattctggtgatgagacctgagaatctgaatttttaaatgcatcccaaccactcatgtttactcttactcctgttgagaaccacaactttaggataaagcagcaaaaagtagagaggctctttggcattacacatacacagagccagagagagtctgagcttgaaaatgctgccatttttatgaggggagtaagacagaattattttcctctgtgctttctgtcatgttctggataatgtaagttatgcacatggaggcattttcttttttaaatgaaaggcttgtattccacattccacaactcttaaaaacaagccgccctgaggaggaggactaggtttttacaattatagctggaagacggtacgtgttaccctcaacacaaagggcagcacaggtagtcgacaagttctgagaattctttctgaatatcatgagtgcagactgtgacttcagagcatcccttttgggaagtctccattagcaggtgtaccaaaaagggttccatatggctccaatatccagtaggattggatgcatatttgagcacaacccaaagagatgaaataatccatccttggtttatttctagatgattaatctctcctcaatatccaagacctgttttatgattaatttgagttttcccacaaccaagaatctgtatcacatcctcaagagtaacagagccccacatccaatgtgatttatttaagaaacaaaagcaaacaggctgctgagtctctaccttcagtgtccctggttcgccaacaatttcataccattaatttctttttcttccttccctgcagtttctgaagaatacacaactctcccttctgcccctccaccctctaccctccaagaactcaggacagttcttgggattttttcattatctcttttcagctggaggtattccaaatggacctcttgaattcccaccctctcatctcctgacttctcctctcctgacttctcctctctccatacaaacattctcaaatctctcttttcaacaaatagacaaataactgaaatacaaaaatacacttccgtacttcagttttctcattttaaaatgagcttaaatatagtatctactttatagggttttgcaaggattaaatgagttagagctaaagctcttagaagattattggcccacaggaagtgctcatctactctcaggtaataatttcatgggagggtgtgtctgtctcaatcacctatcatctgtctgtcggtctctccgcctgtctctagacctatgcttctttctcaatccaccctatctctctcttatctttcattaccaacctctttggaagagtccttctcattttctccctggagctcctcctctcccactcactcccatctctttcaatttgctttggccaaccctagctggacctgaagacgtagttgcatggcccatcctgtgatttctcttttgagctcatccctccagaaagtactgcaatattgtgcacagaattttaattctccctttgttttatttgcagtgttgcaatggagtttcatcgatatttccctttctaaaagaatcattctttggttgtggatgtagttgcggctgctgttgttttcctggttatgatagaaacagaagcttgtagtcctagataatctctcctgacctactttgtaagaattggagtgctgctccttcccaagctctgtgatgatgcttttgctctgttcttcctccaatgacccagtaaatgtcatggctccctaggactctgtcctgggttctcagctcagctcagctcagctcatctcctctttacactcagagatctcaaaatagcaaccttcaagaaggcctggtccacagaaatgttctgttggagcttcacaatactttaaaaaaattagtttctacatttccattttttcacctaacaattcctatttctggcttcttttgaaaaatcagggcgtttcagcatgccaggcttgtgtttctgtgtgatcatggccagctggagctatgagtagagcagtcttaatcagggcatttccaaattcttacaaccatcttcacttaattctgttcactgccccgcccctctaggcagcttaagttgtcattcctattgtgctagccctaggtaagttatggctccgcaaaacaaggacagccaaatttttatttttcagcccaccgtgaccctcatgcccacagccaaattcccatacatgttccaataaatcccagactttctccggccctctcttgctgctcacacttgctgcagcccttcttctctatccctttagcataaccttcagaactcaacattccatctgagagagtgttcagatctggaattctaaaaggaaaaaaataaattatgttatgcattactacttggaggcatgctagttgggcaccactactctataagaagactctagttacataataaaaaaaaatgttaagaagatacgtgatcaacaaggaaggcaggccaacgtctgttggagcagttgggatatgagataaagagtactggaaatatggtggtaaggggtggaaattcagaccatagtgaatccaacagccatggcagagaaaagttgggaggcagataacattaaaataaaataaaataaaataaagcagatgcaaaacctaaaataaagctacagaaagagcttgtgggttggcggtgccaccgagatatagatggaggcagagacttggggaactgttgatggttctggaagatgcagctgagtcccattttgggcatactgagtcagatgccagcagacatctaaagagaaaggttctgtacagttgaaggcaagagatgacatgtagaatagaagggtggatctaaatggcagtttcagaagtcacctatctatctgtggttttcaaaaagttctctgtgaaaaggagaacacagggaaagaggaagaaaaatgaggagcccaggcaggagataaagattcaagaagtgcaaggtcaatcagagaagttcagaaatcaaaatgataatttgatataaaaggaaattgtccaagagggtcaactgagcaaggaagaatatctgcataatatatctacatgaggctctcagacgtggccaggagaagattatttattcagtcaatgaatatacactaaacatctattatttgccagaaagcatgccaagaagaacaattcatcactgagattatatccatcagtgtagactaggttttgctacactaaactcccaaatctttacggcataaaataacaaaagtttatttcttggtcatgaaaggggctctgatccctgtcattctcattctgggcccagactgataaagcagccaccctttgaaacatggtgcttaccatgacagagagaaagaagatatgaatcagctcttaaatctcctcccagaatggaaaagcaagtcaggtggcccacgtaacttcgagaggacatcaaagtgtaattccagcacatctgcagagaagagacctggaacattggtgcaaagcctcagtgactccaccagggttgattccaagagggagtggaagacattcacagccctaaatattttcatgttatttctctaacccaaggccaactagaggggcccagtgcaaaatggaaatgcagaccccagatcgagccaggaaagtcagtgtttccttccctcaggcccccaccttaactcagggttgtgggatgacccccagagattgcacgctctggtacctgatgcagagcttacaatccttgggggtcatcccaccacctgggtcagggatgggcaagaggccccacctaccatgccttggtgctgccaccgccttgccccatcctgagatgctgagggcacgtgtctaaccctgactgtctccacacccatgtcccggcctcatcaagaactgagaaccatggcagaatatgggccttccctcacctatatgacccagttgccacccaggcaaaaccaggtaataggagcaagacagggacaagggaggaagacaggtagggcccaggtcaccagagggcagggaggggccagctgagagccctgcttagggagcagggagagcagaaccacacaggagcccatgctccaagcccctagctcatgtcctatgtcccactggacttcagttaacaaaacacaaattcacagataaaattattaagaagttcttcaagccagcaaccacagagccccttctgagagtgaaatcctgtgcaactgaactgccttaagtccattttaatgcctcagttttgactggaaggacatatatctcttctgccccttcacttgtcttctactttttctatccttccttccaattactctcagaatcatattcagattagggataatcctaataagaaattcattttttgttggttttttgtttgtttttgagacagagtctcactctgttgcccaggctggagtgcagtggtatgatcatggctcactgcagcctcaacctcctgggctcaagcaatcctgagtagcaggggctacaggtgtgcaccaccacaccttgctaatttttgtatgttttgtagagatggggtttcaccacattgctcaggtcaggaattccagaccaggaattcttgagcacaagtcatctgcccatttcagcctcccaaagtgctgagattaaaggcgtgtgcccctacacccagctggaaatacgtttttgatgtaacataaatcccatctactgagattacatgaacaagcttgaaaataacctattattttttaatagtcttcatcaaagatattggattctttgtaacccttggtttggggcctgagaaaaggacagggcaagggtggaaggcacaagttaacttggcaggacccataattttcaaattccagatttatgcaaagtttaagaatatcagccacggcttgcagtgagattgcatatttgataagccctcagattccctctttgccatggaggcggactgcagaagaagtcaggtgtcagggaaatagaaataggtggtcttaatgtgctctctggtgttatatctgtctgtagagaatatagcttacaacagattagcagacctgacatatactgagaacgcagtaagaatgatgctgttgatgttttcagaaatccctggagggaaattttctccttttttcttctctttctttctagaatttgtttgtttgttccccctctgtacttcgttgttcgttagcccactgccgtttatctccctgaaatagttttgtgtatctaaccatattaaacccatttatttattgtagtttatcgctgtttagcgtataaaatgtttatttatcaaccactcacgtatctaacatttacctgattgctacttgccgatgctgtgtgttggcatgtatctggctgggctgcacatatatttgatattcttagataataggagtaaatagaactgtttagaagttctaaagagaggtttcagaatatctaagaggcaaaatattctgcacccagaatgtgccctaatacccagaaaaatgtgtcctagaattgactctgagtgtgtctgaacaataacaaaacttggcagtccttaagcgtaggttaatcccttttagtatttgtgcttttaataccttaggcatctcctcttatcacaaattaataagtattagtgttttatataaggctgctttccccagtcatgtctgaactccataatgggatccagaagtgtatggattatctggttttcactcagcagtggctctttgacacctctcaatgcatggtaccaaaaaaaaaggtccatatagtcagggcacggtggcacataccttataatctcagctactcagggggcttaggcaagagaatcacttgagtctaggagttcgtggctgcagtgagctgtgatcatgctaccacatttcagcctgggtaatggagcaagaccctgtctcttatgaaaaaaaaaaaaagaaagaaaaaaaaaatggtccatacacatttctggagtggatgttgattgcttggttccattttgaccaagactcttacttttctaatctcttataaatttgcgtctgggattattctaatttacttatatgtgtttcatggacgagtatacacaaagcatccatgaagagacaatctcagatgagtgctcagaatctgggctttggaactgtgtttatacctagtcttgagcctaactagctgctgaatcttggacacatcacaaaatctctctaaacttcagaccctcatctataaaggaaaaatagtactagtacccacctcacgatatgtcatgaagaagaaacgagatgatcaatgcaaactattccgtatacagtaagcactccataaatactagctaccactgctctttccagtgcagtctggtcaaattacatgtgttgggcacctctgtcagcaagttagaaatttgaggtgtaaaatgggcttctcagtgcaaacttgttggtgtgttggtgctgtgacctctttccgccactctggatcttccccaaatggctgctcttgctcagacagaggcagtctctagagtttacacacaaccctaatttccactgaaattctttagagaggaggtggtaaaagagaggggtgattatttgggccttctgcttaaattattttatgcctggggtgtgtgtgtgtgtgtgtttgcctccagcaaactctgaagcaggaacaatgcatatgtgcactaaataagagttaccgatgttttaaattgtgcccaccaattctgagggtggacctgagaggcaggaaaaaacttgggttgggtatcacgcattcttccttgcatgtgggagtgttaattctcagtggctggtgtccactgagatggatgaagtgtccttgcaggggccaagtcttacgcatttgggtggcccccttaccttgtcaggcttcctcatttgttcattccacaaatgctcatcaaggccctactccatgtcaggcactgtgctgtgtgtgggggtacaaagtttttccccttgtggatcatacctctagaatagagggaagccataaatatgtgattgaattttaagtactatttggtagcaatatggtttggctgtgtccccatccaaatctcatcttgaattgtagctccaataattcccacaagtcatgggagggacttggtggcaggtaattaaatcatgggaacaggtctttcctatgctgttctcatggtagtgaataagtctcatgggatctgatggttctataaagggcagttcccctgcacacattctctcttgcctgctgccatgtaagacatgcctttgcttctcctttgccttccaccatgattgtgaggccttcccagccatgtggaactgtgagtccgttaaccctctttcctttataaattacccagtctcaagtatgtctttattagcagcatgagaacagactaatacaggtggcatgacaaaaataagtaaataaatgacacagagcaaaggaattgagaatggtagtgaggtgcagaggtggggagggaacaggtgttttaattaggccaacagggaggtggtatttgggcaaaacaaggtgagagaatgagtctggtgagaggagaggaagcacattccaggcaggtgagcagttgcaaaggccactggtggggagatgaacttcaagtggaagaaggggaggcacataagcaggatttgggggattaaaattagaaattatggtttcatattgaatgaaagaacaacaaaggaatgagtggattgatggatgtgggtgtggataagtgattcaatccagcagtggggaaaccaatgggctgctgtggttacagtcaaggaaaccaagctatcgtgagacaggtgatgcagtgagaaaagtcttgtgttgcattacttctcttccttatatcagttagctctgtaatctttctgagcttcagttttctcatctgcaaaatggagataatctttaatggttcttatcagaattagagattctgtatgcatcaataagctactgctattaattgattgcattacattatatcatactattttaaatatttttcaaaatgatgaaaaaggaatgcacatttaaggagggaggggagatgccctagtgtttgactgtgtagctcattttgtctttattgcataggcaaatcattattcggtaacctggaggttccttttgcaatgcaaatctctgtaagagaagaatgtgatggcttcccacaggccacctctctgggtgccccaatgtcttccttactctcctgactacaacctcgctcattctctctcagctccttaagtgctacaggcttctgctcctgccctccaccccacggctggtacacaagccatttgtccaactggtctcaagacattttgcacaattttagggcaaactgaccacctagaaatgcagtgtgaatagtgtcccctgcagctgcagaactctgagatcctgcaagcctttttgcatggcatgaacgtcacctacctcctgatttctccagtggtcttctactcatacttgagaccctatgtcctcagggaacctcctctggcctcccaaatgtttgtttagtatattgttttgaatggcattttttaattctgccaacgagaaggtcaatgatacagctgtatgtatttgctagtgtcttagtcagtctgggctactatagcaagaaccacgggctatgtggcttgctcaaccaacacttgagcaagtttaaatattccagaggctggaagtctgaaatcagagtgtcagcattattgggttctggtgagggccctcctcctgatttcttcatgggggagagtgagagtagggtggaggatggtgtagagaaaaaggaaaagggagagaaagagagagagagaatgcttcagtgcacgttctctcatgcctcttcttataaggacatgaatctcctcatgagggctccaccttcatgacctaagtacttcccaaagcccctatctcttaataccaacccattgggagttagaactacagcatatgaattttaaggggaacaagcatgcagttcttaacacctagtaagctccatatagaggttcctggccaatatcatcactgtctgcaagagataacatatggcatatcttccttaccaagaacaatttggagttagctaaactaatttaagtcattcatccacttaatgtatagttataaagcacacacaaggtatcaggctctgttctaggcactaagaatttggaaatgaacaagagacaaaagtacctgcccttcaggagcctccttcctggtgaagggagacagacaatagttgtgtatgtaagacaatcagctagtgctaagtgccattgtgcacataagacagggttatgcattcaggaataacactgggagaaggaagcagttctagattgagctgagaaccaggtgaaaaataggagccagttgtgcaaatatttagaacaagagtgtatcaaggagagccagcttcaagttcagaagtcctgaggcttagttaatggcattgatcagtcatttggcagtataaactgatacaccgtattttaaagccgtaatcatggcaaaaagcaagtgcattcaaggcaccacttgggttctaagtagctctctgttcccatcttttggccaagcagtggacaaattcagtatgtttctcactgcttaatccaatgtcttccctcaatctacctgtctctccattactaaatgactgaaatggcacctggatgtaaaggatgagaagtgtgtattttcataaagacttgtcacagttgcattacagttgggccacatggagaagtgacagaattattatccttcttatcactcaggagaattgtggaattgtacagtgatggaatttgctcttgatcaccactgtttgatcggcatgcttagagaatttaccagtgcattcatgggttaaaagggatatccagataaaggagccagatgcctctgctggcttacgctatatgggtaaatggttcttacgaagcagtgtatgatagttttgagggttagtgagggaagatttaggataaattttgtaagaaacaaatagattttaattttaggggagcggggtgggaagaagagttaaaatatgacccaaaaaagaagaagaaaatcctagtgtcttatgtgaggtccactgaaagcagagcctgaggcagggatttaggtgctggtgatttatagagggagaggtctcagaaaaaaaaataaaacaaaaacttacgagagagtgaggaaagcaggacagggcaggagaaagatgagtggagggagggtgtgatctcagggaaaatctgatcttggtctgaagcacaggcagagggctctggaacataaactccagtggagctgtcctcatttgaggtaagggggttggatttgtgtatcccaatgtcagccagtcatcagttatgggtgtcagggaggttccttaacctcccaggtgggtgactgctagcagcctctggggacaattttctggaggggggaagctgtaagcagccagcagccaccactcacaatagccatagaatggccacaccagaaaggcatcttggtgggtgtactagtccattctcacattgctttaaagcgatacctgagactgggtgatttataaagaaaagagcctgttccacaggctgtacaggaagcatgatgctggcatcggctcaagaagctcacaatcatggcagaagatgaagggggagaacacatcccatggctgaagtgggagcgagagggagagagagagaggtcaggtgctgcacacttttaaataaccagatgttgcaagaactcactatcattagaacagctccaaggggatggagctaaacgattcatgagacactcacccccatgatccaaccacctcccaccaggcctcacctccaacactggggattacaattagacctgcaatttcctagggacacagatccaaaccctttcagtgaggtattcatcgagtctcctgcacatagattctccctctgccaaaaaagatctatttttccacaaaagaaagtgcatacattcatttaattgttaacttatttattcagtaagatcttactgagcatttgctatgttctagatatcggtgtcacatcaatgagtaaactggatttgttgccagttgtcatcaaacttaagcaaatagggacgagacacaactaaatgagacattgtaagacacgatgataagtgctacagcaagagaggtcaagttcatggaagctcagagccctcagtgcagtcaaggggagagagtccagcgctatgctgcccagcatggtaacgatgaacacatatgactgttgaatgctggaaatgtcactaatcccaatggagctatgttttatgaaatacacatagactatcaagatgtaatatgcaaaaaaagaatgtgaaagcttccactgacaatgtttatatcaattatatgttaaaatggcaacattttgaatatattgagttaaataaactgcatttttaaaattaattttgcttgtttaatgtggctgctagaaaatgttaaatcacatatggggttcactttatatttccattgaatggcatagctcttggggcttcgtaaagctttatttcttcccttctgcatcacagaaaacctcacagaacagtcttctagctaacgtgtatttccactgaataacttctcataataaggaagatgtagccaagagtctctaaatctaatattcagcatttctaactgtttgaggtgcctatgttttgttttgtttttaataaggccctctaattatggattcctctttatattttcctctggtattcaaaggatcacaaacatacaatttccctcccacatcccatctagataattggagtttgattcaacactgtttccatccaccacggatacaattctcatttcatgattcctttctttcccttctccacatggaatgagcatgaatatgaatccgtggattccaaagtgaaaaggcaaagaaatataaatggtttgaagtgcgtctcttttcaagcaattttttcacctaacctagtaagatgtcactccgcagagatctcacagcacagccacactacaaagtatgataatcgttcaaaacataattgaaagatttcaaaagttgaactggaagcatttttgtcagagtttattgcaactattttgtatctttaaaaaaaaagtttatgaaagttctgtgacaagaagataaattatggaaccgtaagaatggggaaataaatgcattctggagactgacaaacagggcaaatgacgagaacatataattttagaacacaaaaaaaggtaactaaatttgaaaaattgcattagtgtatcattttctgtgtatgagccattagagggaaaaagtggaaattacaccctgtaacaaagtaaaaatgttttcagtgtttaaaggtaattttgtaatactgctactattacttaaactcttacctcttataaaaaaatccaaagacaggacccctggtgatattacctgtgtcttaggcaaagagcaacaatttgaattccattcaaacacatttgtattttgccaagtgctatcaagccctgagttgcataatttgccgtataagtgaaatagatacttttcctctgcacatttatcactctcctgtgggcttcattactgacaatcaaatcatagaagatgtacaaaattgtcatgatgcacttattttctcatgatattcgatacaaatagttcttctttacaaatggcctcttttttttttctctttgccacaacatttttgctgtctttcagactcttaggaaagttccagtgatagactttttttcccagcaaagatgtaggcctccttggaaaacaaatatttctatttggggaaaaattaaaaatgcttcagacagacaaaatcagtattgtttacaggtagttcttttactgttgctccatatgtgtgtctgtgtgtgtatgtataacatgtgaaagtatttatgaaaacaatagcttctgcctcaaattgtcttcctttagaactcatacatgtctcattactaaatcatcttaaggattaaatttagggttacaatatctaataccccaaatctagtattaaaaaaaagtaaatgaggcagtgggcaagatatatatagccttcattgtctagctattatttttctacttttcagaggattatgtttcagtccactctgaacaatgatggcaggcagttgacactgcacctgtaattggaaagactgcagggagcagtggggactgtgataaactgaagactcatagcctctggagggaggaactgctctcaactcctgttttgagttactatgtgggatgctacattcccccctttatttgtcttcaagagaagccaaaaatctggatgtctttcattgagagacagttattttctgatttttaaaagttgataatgtttttaaaagtgtataaacaccaaacaagccaaagaaaacacattttccagcgagatacagcctgaagactgccagggtgtggcttttgtggaagagactcttctctaagtttctcggggaagtcgaggtcattaaacaagagtagtggagtaagtcctgagttttattgtccctcctctctccctcccagcaagtgatctattggaaatgagatcgtctattgatagatgttgcttaaaatgtcatctacattagctgcaaatattccacttttcttaccaatattgatagtatttgaatgttaaaaatagtgatttctggctgggcgtggtggcttatgcctgtaattccagcactttgggaggccgaagtgggtagatgggttgagctcagtagtttgagaccaggctgggcaacatggagaaactctgtctctaccaaaaacacaaaaaattagccaggtgtgatggcatgcacctgtggtcccagccacttaggaggctaaggtgggagggtcgattgagcccagcaggtgcaggatgtggtgagccaagatcacgccacttcactccagcctgggtgacagagtgagaccccatctacaaaaaaaaaaaaaaagaaagaaaacaacagcaacaatgatttcctctatcatcaacaaccatcatgacattattgtcatcaacatcatcagcagtagcatctagttgagtatgttttaggacaaaaaaacgaaagatctacaaataagaccacttttattttctagacttcaagttaatttctatttctatcagggcaaacagaaggcttcaattttaatcttttacggggtcctctttccctaaggttgagccagggatctagaaagtactccagcccaaggtgtttggagggaagagggggcagctctctggaaggatgtacagcctgttgggttacggggagacgttcatcacaccagtcaggatgctctctctggcatctgggccatgcttggaggatggatatttttcggcaaggctgcctctggtatcacggctacctagacacaccaaagatattgaatccctgggatgttggcttccattcactgtgcagtttctcctcctcccagccaaagtggactctctttttcatctagaattggtgggggacagggcatgaggaaggcccactctcaacccccacttctgattaaatacattttcttttatttctgttccaaattctctaagcttccctagagatttaaacttttggaaataaaaactgggggaggtactgggtatttccgctttctactcttccacttcccttccctgacataagaagcaccacccataactacatgaatgggttggagacaaaacacggattaaatcacagaagtatctcctcactgtcaccaatccggcttctccagccacctctccatcagctctgtgctggatctcagtaggtattgtctcatctatttttcaaagcaacttctatgaagtaaatattctcatccgtgtcagttatctattgacaggacagtgctccataaccaaaacctccaaatctcagtgccataaactttaacatttttttagctcaccagtctgtggagtacagatgacctgggctagagctgggctgatctcagttggtcctcttcaataaacgtatgatcagcttccatgagggattacagcctctgcttgtctggactggactcactgacatgtttaggggattgactatcggttggctgatctaggacagcctcaactatgatggctaggacaacttggtcccatatcacacctgtgtaattgtggagcaggctaacctaggcattttcttcttacatcaatggctgagggtaaaagcctgaacaagtccattcaggtaagcatttttcaagtttttgtttgcatcacacttgctaacatcccagtagacaacatggcacagtcaagcctacagtcagagtaggaagatacaagtaagttagccggcaaagggcatagctagagaactgaagtactggggcccataaaacaagcactaccccatttcccgaattatggaactgaagctggaagaatgaaacaatttgtgtagggccagagcctgaaagtaaggtggctgggctttgaacccatacatgcctggttccaaaactggactcctaagtgcatgactctactgccttaatttttaaaaggtgcttataaaaacaattctccgtgttaatgcagcatcttccaggccaaatggagcgttgggtaattgcctgcttaatatggttgatagagaaagcaaacttcaagccaaaacacccgaatttcccctaaacatatgtaatcatcttaattttctcttttcctctgttgacatagcttagggaagacaactcccttttagcgtcagccagtgtttccctgggaagcagcatgcagggaaatagggttggcattctttcctcctaaaaaatgcattttatgtaatcctgctatctttcctgggccggcccttcactacccactggggatctctcttgcttaactgtactcttttccaatgggtttgaacccccctgcatgtctgcaatcaggcttctgttgggcaatttgggacccagatttagtcccaatcacttgaatccatttggaggctgaatttcattcctaatgaacaaactgctcaagcagtgctgatgcatctggaaggactaggtcactgatcagtgactggtttgttccagagggcagtgttgtcctaatctgagagacagatcacatttttgaagagctaaatgcaaacctagcatcaggaggagctctctccatgcatcatcgacatgaccaggaattgccaacttggctttacggatgattagactttttagaatatggcatgaagccctagttatagactcaagttataacaatagtcatcatatagcaataaagattttctgaacctttgtcaggtagcagaacctatactaaactctttctttgcattttatcttcacaaccatcctaagatgttgatgatgctacatgcccattttccacctgaagacatggagatttaggtgacttctttcccagggccacactgtcagccagaaagtgacagacacagccagggagtgggcataacacgtgattgttaggaggttagcaaactttttctgtaaagggccaaatagtaaatattttaggctttgcagaccatgcaacaaccactcaactctgctgctgttgagaggaagtagccatagataatttgtaagcaaatgggtgtggctctgtgccaataaaactttatttacaaaagcaggcagtgacctggatttggcatcactttcaagctatattgctttggccaatttactcaacctcttttggaatgcgattttgtcatctcgaaaatgaggatgataataatcataatgcttaatttatagggtgattttgaggattaaatgaatgttgcatagaaagttcttgtttatattattactaatggtttatattattgctaattattaataattacaaagagatattgtgaaaggccgtagaggagagaagtcaacagcaagtcctccctgggcataagtctcatctctcctggttacccgctgagtggccttgggcatgttacttactctctctgagcctcagtttccttttcttgtaaagaatagtaaaaggatgagtctcacagaatgattacaaaggtgaagtacatttaatgcctgtgaagcttttagaacattgcctggcacatggcaagcactttctggttgctcgctgtattactattattgaataatcatgaattgagcccaaatggcctggcttcctacctcaggctctttcccaccctacgttcctgcaggggttcttaagtattttatactatcaggcaaccccccggtgatctgctgacacctgtggaccccttttcagaatactgtttttgaatgaataaaatatataaaagattacccaaacacctaattatacaggaatgcagttaccaaaatatttaaaaaaaaaaaattgtgatgcagttgtagatgagcttctttattaacacattagataaccaaatctatcagtgggcttaataattacaacaattttgaaatagaaataagcctcagtgatatttcaatatctctgcaacaactgtaatgtgatatgcagatatttatgatttgtattggtgctaaagtcacaagtcccatgacttagtggctacattgataatagcagaaatgctaaatttcacttaaaagttggtaaaaataaaactctgggtttttgtttgttgtgttttaaatgcacatttatgaaattcccagattcatgggactcttgatgtccataggcccccaggccaggaacctctgtgcctactaccctgaagaagccattttaaacagtaataaacctgaacaacactagtgctcatccacataaatactccttgcatctagatcttttggcacataaacatcgattagatttggcagagcgatgtccacaaagagagccagcgcttcctatgcctgtgcgatcacacagcattcattcctgggtatgtgagccagaaattagggactgccttgtcccgtaatttgatgccctacatggggaaagattgtcgttgggactaagccaacgagaggtaatagaaacatgataccactgacctcatccaggaaaaatagctattgtcacaggacagtgatgctgagtatttgtaggtttggggagaaatatatttgttagtgaaatggagcttactctggagtgagtaaaggtgaattatttttcagatgactagaggaggtttatgcaatatagtattattgagtggggctattaacagagtgaattgctattgtgacatgccattaaattgtttttagtgtccacaaaggtatcattcaggagctggcagggttagtaacagagttgtatttttggtggacagcagtagatcttgaaacaaaatagcatattttacaaaaaagtaaaatatgaccaaagctgaaagtctatagcgcgaggtagtcatttgcaactacttgacaagcaccccgaggatctgaacaaggctttccggatccacactgttgtagatagtggaggctgaaatctgagcaatccatcaggaaggggaagtgaaggaagtgagaggtagagataaatctgaatcctgggctctttcgaggatgttctgtccgttccatgaatgtacctccaacatgtagcagagagactggcttaataattattggctgaaggaaggaaaaaggtaaaaaaaaagaagaagaggaagagaaaaagaaagagggaggcaggaaagagagaagagagagcgaatgaattagccaaccaaactattggtggtatattgatggtatctatagatgcacatgtggatctgtgtgtgcatgaagatgtattcattcatttgttatttttcaataaatatgtattgagtgcccactaagtgttgggcactgtgccagaaactaaaaatatattcaatgagacagaaaaggacgaagctctcagatgacttacatttgagtgagggattcagagataaacaaggattgaaataagcttacttcaagatagggctaagtattataaagaaaacaaacaaaaaataaaaacattgtaacaagggagaggataactagaaagaagctatggctgggcatagtggcgcacgcctgtaatcccccaatgctttcggaagcccaggtgtgagtattgcttgaggccaggagcttgagatgagcctaggcaacgtattgagaccctgtctccaaaaaaactttttttaatagaaagaatgggctactttgggtaggatggtggccctgaagctgaaaccttgatgacaatgaaccaaccatggaaagatcagtggaaactgatgtttgattgacagcgacccacatgtcaggcatgcactcagttctttgcatccattatttgatttaatctttattgaaaactgtgaggcagagtatttataacaacttcatcgatgacaatgaagaaagtgagactcagagagacaagatgacttgctcacggtcagagggccaggaagaggcagaggcatgatttgaaccctgacttgctggatccaaagcctcacagatgagccagggtgccctgctgcctcaagaccaagggaaggtctttattcctgttcatgctaatgaggggagaaaaatttgctctaaagtctctgtcttttgatttgcaaatgagtgttctttttttaataccatgttgtggctgtttttggctggtcacttggctttaatcgtaaaacttgttgtaatccagatagtagatttcatcttgagggtgattcctaaatgatactaaagaaaatgtacatctttcctatgtggtcaaagaactgagtcatcttcctaagttagatggtggtggggaaagggacagggacttaaagaaaacaaattcttccactgaagaggctcaaccccatatgggacacattttctcataactaaactcatatgggctgagccatgtggactgttagaaaaatagagtaattttagtatcaaccagctacatcctgctctgtttctgccttggtgccttggttttattgtttgtttgttttcttgttccgtacctgcttcactggggccagtgaatttggtgtttgttgttgttgtttcttggtttttgtttatattttaagacagtagattgctataaaacattggtagtatgatgatagataattgcttaccaaagacatgcaacttaaaccaccaagtaccataattgttactgttactatgattatttggggtatcaattcgctatattatttctttatgtcaatacccagagaaatgagcaggagcacttttttttttagatggagtctcgcactgacgcccaggctggagtacagtggtgcaatctcagctcactgcaacctccacctcccaagttcaagtgattctcctgcctcagcctcccgagtagctgggactacaggtgcacgccaccacaccaggctaatttttgtatttttagtagagattgggtttcaccacattggccaggctggtcttgaactcctgacctcgggatccaatcccctcggcctcccaaagtgctgggattacaggcataagccaccatgcctggctgggcaggagcacttccatatgcgccaggagaaagtccaaattcataaccccctctgttgagcactttggtaagagatcaaaggcccatgaagtgaacaaaggctgtgaccccgtacttacatatctagcaatctagtaggagaatctctgcactaagatatatgtaaaattatatccagtgaaacattggtaaaatagtgaaaaattagaaacaacaacaatatccaataataaggaaatatttatttttgtcagtaatataaaaacttttattattttagggcaatacttcccaaatttcagttatttgcgcaccattttcacaatgtgccaaagctctactctttattatttaatttttaaattttgtgggtacatggtagatatatatatgtatggggtacgtgtgatgttttgatctaggcatacagggattggttacttttttaaaaatcgggcaatggatcatcacctagcattaaaaattcatgtttataaaatgaaaggtttcccacatattaagtaggaggaacaaaaggcaacttacaaaatagtgtgtacattataatctgtaccatactatatccatttatagctataatatatcaataagtggatgtaactatagatagatactgttggataatattgttattacattgttatgatacaatttatcatagacagtgctcttctttacatttttctattacttccagattttccttatgaaacatgacattatcaccaggaaaatatgcacacacacaatgaatgaaggtcggcgctgacggtgcaagtttggctgtcagtctacgcagagtggctctgcgtgtcttctcccctcccgtgccttgcttaaccttcggttggatgatccacccttttctgtggccagcgctggctcctggcatccttctgcttgccttttggttttcagcacaaattcctgatctgattcaccaggtcctgcttaatatgtattaccaaccctgtgttgacaatttcagaaaaactcagtcctgcttttatactcgttttcctctcggaatggtagccggcaaaaggtgttcttagagatggggggtcctgtgtcttactaattcccataaagggaaggggagtggcagaagaagaaaaaaagtaggaaaagaaaatgttagttatgtgtggttgatagtggctcagtgggtttacatattatgatagttatcaatttcttagcgctagatgctgcaaatctaaatctatgtaagactcaagaagtggttgtgtgtcttgcatgtgaactgtatctcacagctaaaatttaaaaaaaaaaaatagaaagaaaagaaaagaaaagaaacagtcatgggagcaagggagagcaaaagccaaaggtgaattttatttgttgttgttatttaaagtaactgggtcagccaggtacagtggctcacacctgtaatcctagcactttagggggaccaaggtgtgcaaatcacttcaggccaggagttcaagacaagcctggccaatgcagcgaaaccccatctctactaaaaatacaaaaagttcgccaggtgtggtggcgtgagcctgcagttccagctactcaggaggctgaggcatgagaattgctagagcccggagggtggaggttgcagtgagctgagattgctccactgcactccagcctgggtgacagagcaagactctatctcaaaaaatatatatataaataaaagtaaataaagtaacagggtcgactgatttcagaggaatgtgtatgttgaagggcagtgtggttaggagagaagatctcagtcgctggattcagagttgcctgggttcagacccaggccctgaattcatcggcgttgttaccttgaacagagacagtactatttggcaattaatacgagcatcaagcaaccagacacccaagttccaatcccagctcagcaatttctaagtgtgccattttaggcaagtcacttaagtgtctgagctacacttctttgcatgcaaaatgagtgaaatgctatttcttttacagaatcagaaatatattattaagcctctgacacgtggatgatacataaaatggtgactaatatcactttcagtgatgatgatttcattttatgtatgtgtcttccaaagaggaagaaaaataagaacatgaggaagagggaaagataaaccagattaggttgtttatgatttcatcaaatggagaactcctgaacgttttgttatgtgttttgtttttttgtgaaacacaagaaagtcaccaggacatctgtgtgggcatgtgtgctcccctccatattagattacatgttttaggacaataaatcagtgaaagaaaagtaataaataatgcatgctgacaatgtgatcatgtttattaagaagcaacagccttgtcatcttcattttcttcttcagtgattctcttctctaagggttttctctgcagggactccctgcaatctagctggaggccattctctaattcctgtttgcagaaatacctgctttgcaaaaaaataagttaaaagctgaacacctgggtcctctgatgagtctcccatcaaatgcagcccatcattagagatggcttctcagttttgaacatcagggagaaacgagtggccccactccacgcctcctgcgtgttggtgctttcccaccctctgttcttgctcctgtctttctgctgtgagttttctaagaagtatctttaggcatctagattttgaaaaagaaaagaaaaagctaacttttcttttcctagaaatttgcagctgctaaaaccagatgtagacattagtaccttgtgacatctgaagattttaattgggtttgcattttaatctgttactcttcactcatttgcacttgaatgacaacccccccccccccccaaaaaaaaaaagccacactagcaatcctagtctctcagatgcctggagcagaattttgctctgtaaaattgaagagtgttgcatattgagaaaaagagagggagcgagccaggttgagaaagtgggagtggtgaaggagagtagagggaaagagacaggaagagagaagaaggaagaacttgcaggcggtagccaggagcaccctggctggagtagaaggaacctcacatgcgcctcaccctcagccttgtatcacctctttgaaaatgtaatgatcaatctgacccaggcagtaactgttctgacatgccctttcctcaaatgtcttgctgtctgtgtcctaggttctgagagagggttctatcttttgagaacagagctagcttaggatttcagtcaagggtcagcttatatgtctctaaatacccttgaatcccctgctcccactgcaggtttctcattattctttctgcccctaattttttttttttttttgagatagagtctcactctgtcgcccaggctggagtgcagtggcaccatcttggctcactgcaacctcagcctccaggttcaagcaattctcctgcctcaccctcctgacctggcttatttttgtatttttagtagagacggggtttccctatgttggccaggctggtctcaaactcctgacctcagttgatctgcctgcctcagcctcccagagtgctgtgattacaggcataagccatgacacccaaccctgcccataattttttttgtcctcaaataaaacgctaatcttagaaaaccacaaaggtccccctctctttctctccattctccttcctagtattataccacctcttcatcccaagacctgcatcatcttgctgaaggtgtgtgtactgtgacactttatcattgagtgccaagcctattgtgcttaaattattcactagtcaattacctgtgtacagaatccatgtttaattagcttgtcctgacataaaatatcaggattttatgttccctctggcttacctctgacattcatttttaagttaatgttttgtcttcttgcttccttcattccctctcttccagccttcctctcttattctctttctaccgttttctatctttcatgatgcatatctcttttctctttctcattcttttctctccctgctagcatttgattaagttacaaaagcagtaatatctatgtttttaatattattcattgcattgctttcctgaccttctttttccctccagggtgggaatgcagcccctgaattccttgacaggtggccactctttgacacgttagactccaacttgctcaccttcttccaactggcttcagttcattccattttgaccactgccatggttggcttctacatgatccccatttgtgtctcaacttggtctcctcagccaggagctctgagctgcctgttccttgcctttgatgtacctccatttcctgtaattaatctcagctttcccacagctcagcagtacatgacagacacaaggataaagcacccagttcgagccagctccagtgtctctccacttgtatccattcctcgtggtctgccactttggtaggcatcatcttaccccagaggtagcacatatgcatgccatgcagaaaacacaacactgacttctgttcaaagaaaatcaaaccgccagaaagtgaggtcatgcaagcaggcagctcgtcatattctcaacagggagctttgctggataattctgcttaaaaatacatatatttacatttttatttatatttagttctatgtatattcagtgttccaagaaaaactaataaaaatcaactaaacatctagccattccagtgaattctatcgcattgccaaatatagtattgggagcattgtcctaactctgttgtctccgtggtatcaaaagccagtatcactctgtgttcttgattttttcttatcgacattcctgacactggctatggggtgtgttcagcaccaaaaggtctgttttgcctaaccctttgaccaatagaacaagtagattggaacaatctgtccttgtaagggttctttataaaaatgttgtccttgcattctttgatagattttttaccattttttctgaaaaaaaaaaaaaaataggccacgtttcatgggcaagaccttgatactatctggagaaacagatagccacaaaaagtactttgaaaaattaaaggcattctactcattctattctctaaacagttaaaggcactctacttgccccatgagtctcaatttcctcacctataaagtgggcacaactcagcacgccagaccaatagcaacctctctgagataacccataaagaagtgctctgaaaaccccagaatgttctaacaatgaaaacactgtgctccatcttcatttttatctggaaaatacagcaaattatattttctttgaagctgtctacaagaagtgtttggctggattagccagttaatgttagcaaactgtgttgagatattgaaaggttttgtaaaaaagaaaacaatatatgtttttttctgacactgtagaatgtttagtgttcatttaacctggagcatagcacacctcaatataaattttctcatcatttgacactttttattgtctctgcttaccatctgaaagaaggaagctgggcatttggaaaggggggagtttgtgtatctcaggattttgacttgtctgtgtcttccgaaggagatgcatcctctatgtattacgcagcaacttgctttgctcacttaaagatatagcatggacactcttaacaattcggcagctacatagctacacggacaactcggtgtttttacgcactcacatgttacataattttacataattacgatcacattatatgatatttgctgcttttatatttttgttggtcatcttctccctctttatgtactgaccctttcactgttggtcccacccctttcccactacactctgctatcccaccccatccgaaaacccaaatcaacaacttgaagaggacgttcacactttatgccatgggaatatgacctgtttgtgacatttatactctttttctctccaggccatctctcccctgacaaagaaacacacacacacacacacacacatacatgcacatgcagacacacacacacacacacacacacacacaagggttgtggcactgcctttttattttttaatctatgtttgtgaaaatggcaagcatcctccaagaaagaagacctcaaatttgtgtctggttgctttttgtcttatttttaaaattatcatatggtaaaattgactttctcctgtggtatacagttttatgaactttcattcatgtatagatctgtgttatgacaacaacagtgaggacccagaagagctccagccctccagaaaactccctcctgcttccctctccagtcacaccctcctcctaccctactcccggtcaacctttgatttgttctccatctctatcattttgtctttgaataatgtatatagatagaagcccgcagtaattaacctttggggactggcttctttcatgtagcataaggcctttgtgatctgtacgagttgctgcctgcacctgccaattactcctttgcattgcagaggaatgttctggtacatggatgcactgccgtttgttgatgggttctcccaagagtggagatttcctatggtgctggttaagtatgtttgtttatttttattttattttattttattttgagacaggttcttgctctatcacccaggctggagtacagtacagtggtgcaaccatagctcactgcatccttgacctcctgggctcaaggatcctcccacttcagcctccagaagtgaggctggaactacaggtgtgcaccaccatgcccagctaatgttttatttttttttttagaaatagggtctccctatgttgtctaggctggtctcaaactcctgggctcaaatgatcctctgacctcagcctcccaaagcattgggattataggcgtgagccaccacacccagacaatgtttgtcccatttctagtacttcagttttaggtagtgtattcgtgtgctttctgttgcttataacagaatatctaaaagtggtcaatttacagaggaaataaatgtatttattatagttacagaagctgagaagtccaaggttgaggggctgcatctggtgagggccttcttgctggtggggacactccacagagtcccaaggtagcatagggcatcacactgcgagaatgctgagtgtgttaaggtgccatgcacaagtctctcttcctcttataaagccactagttgcactcccatgttaacccattcattcattaaccctttaatgcatgaatggattcatcacctcttcaacgccctacctctcaatactgccaggcaggggacaacattcaaaccatagcaagtagagagcgtatattggtgcatgcatttaccaaattaaaacatggagaaaaccaagggatcgaagagctagtttttaagggaacttaaaattaatttgagcttacatggcagatggactactgggaataataactccttccaccatgtattggctacttgctgtatgtcaggcactgtgctgaacactgtatttcaatattttattacctctcttaaagcccacttcagtagacactcttaattctgttttatagaagaggaacctgtaacatcaaagtagttagaggaaagtatccaatctccctcccaaacactggaacttcccagcagtttgtgcttctcttggcttgagttaagagtttcaagtctcctttcactcagtagtttagataaacttgatattatagtttcctttcattcctctaagtgatgcaaattgctttacccaaagaaaggcatcacattacaccattacaggaaaaaaaaaaatctactgaggaagaaggggaaaagagatgtttggattttttttccccttcatttttttttctacctgattaaaatgactgttaggatccattttccccttctttcttgttaagtgaagatattccgatcttacatacagaagcaaaatgaagaaaagagatgatcggttatgtggtttaatggactgatatcgtctagatgattcacaaagcagggagggtggtgtgtctgccctcctctgcctgtccctgtgtggggatggcgcttgggttccgaaaaattaaaatacatgcaatcaaccagttacctacttcaatttcccactgtagttatcctggtttgcctttatcattgatagtaacacttctgcagctaaaaatctaagaattagatttacaaaataccaagaaaactgctaacagaaatttttcttctattagctatgtagcatccacagctgggcagacagatggataatatattcgtgtttcttttttttttttttttcattctaaacactgtgtatcaagtaaattgttttccccaggaaggatcttgctggctccgtcaccaagaattcagctcctgcaggttacataactgttcgttaggcattgaagagctcaagattccagcgtctgtgaataactgatataaatggaatcactttgtaaatggctgtcaggaactgcccctccattaaggagccacgtctagcccatcacagttgccaccatccctctctcacccatcaaatctgccgctaaatcctatttggtctacctctgaagtggccctcaaatgagtccctaactctcttcacccccacggctgctgcttcatccaggactttgtcacctttcagacacattcatatcatcgccctctagctgatctctgtgcacgtagcccctttaatccattcttcttattggcaacaggagcatctttgtaaagcacagctctgacctgatcatgtagttccaaaaatactacagatcccagggctccaaacaatatttccacaagtgtagcggataagatgctttggaggaacatacaaatgaatacatttcatttgaatagttgtggtatttttagagctatctttaaaaaataaatctaataaagtgtatttttaagtgagctacttaaaaaagaaatccccaagtcagtagccagccaggacaaaaattgtgaaagtggtccacaaatgactaatgtttggaaaacactggcagaggcagaaaatccaaactccttagcccagcattaacaatacttcatatatcagtggccgggcgcagtggctcatgcctgtaatcccagcactttgggaggccaaggcgggcagatcatgaggtcaggagatcgcgaccatcctggctaacacggtgaaaccccgtctctactaaaaaatacaaaaaaattagctgggcgtggtggtgggcgcctgtagtcccagctacttgggaggctgaggcaggagaatggcatgaacccaggaggctgagcttgcagtgagcagagatcaagccgctgcactccagcctggacgacagagcaagactcttgtctcaaaaaagaaaaaaaaaaaaaaacaatacttcacatataggttcctccaaaatagcaaatagtcaccttaaggtctgcctattctccctccacacaagcttttcaaccagggcttttctctcacccttagtcacatcaaacactcggcagttttttcagcacactaagtcctttcatatttgtgctcttcctccaccccccaacccctgccaacatattgttccttttatctattctagattgtatttttctacctgatggacttctatatatacttcaaaacccagtttacatgtgccaaactttgagaacccttctctaagtccctcaggtggaattcaccaggcctctgagctgctacactctgctggtaacattcaacacctgatgttctggctgtttcagtaggtgtttccttcaatccccagcactaaggaatcccacagggctgtgcccaagtctctgtctctattgaccagcggtgggcatggtgcacagagaagggctcaaacattttctgaacaaatgaggaaatgaatagctgagtgaatcaaggcagattcaagggtgtctacaggacagggaggtctcacacacaactaatctgacaaaaggaattaatcacaatacaccatcctccctgctaagtgggtctgagaaagttgttctgacagtgtttctcaagctacttaaccacaactatcttttcttctttaaattactctgaaacatttacccttagcaaatggtgacacagctgcacagatgccttcacataacactcacaagacttactataactgcttgctctctgcctctcctccccaccagattctcggtttcaccagagcagagactaaggctattttgttcattgcagtatcacctgctagtacagggtctggtttatagtaagtacttgttatttcctgaataaatggcatctaaatacatattccatgaatttatgtggccaccagactatctcgatttttccttgaagaaagagactgggcaaggtgaggtgggaaacctcccacagaaggccccttcaaagcaagccctttctttaaaaagtatttgccctgcgtttactctgccctgctgtggtaccagctgccagcctggagtactttccttcattccctgaattcccactgtcctcccaatacaaatcaatctaattctgtgttactggccagcattttgcttttaagtggcagtgatcaaaagtggaatctttcgtgtcagatagagggctagcagagtggctggcacatggcaaggcctcaaaagtgctattatcatttacaataatttatcatgatgtttacactcctaatgataataaatgctatgtgcaaaaaacttggttctctttttctggtcccttttatcattttatgtccagtcctgaatccattcgactgtttattaggattcacactaaaccatacctatcagtgatagctgccctaagaagcttttttgcatgtttctcagcatttaatcattttaggacttcgctacagaacttctctaatcccatcctctttatgttcactcatgcatgtactttttatctggccgtttttttgcctcactggatcttaattttctcagtccttcattaattcgttcgacaaatatttactgagcacctacgctatgcaaaggtactgttctaggctctcagtgcacagtgttgaacaagacagaacagcttttaccctcataaaaagtttactgtagtggggagaaagacaaaaagaagaaaaaagggaataatatgtacataaataaatatgcaatatatataatatgatatactaaaatatgttaatagaatatagcattatatttaaaagatagaggggccaggcacggtggctcgcgcctgtaatcccagcactttgggaggctgaggcgggcagatcacgaggtcaggagatcgggaccatcctggctaacacggtgaaaccctgtctctactaaaaatacaaaaaattagccaggcgaggtggcaggcgcctgtagtcccagctactcaggaggctgaggcaggagaatggcatgaacccgggaggcggagtttgcagtgagctgagatcacgccactgcactccagcctgggtgacagagcaagactccgtctcaaaaaaaaaaaaaaaaaaaaaaaaagagggacagtcacgaagacctgaacctcagtcacagagtcagtggtttcttggtttaatttctgattctgacccccatggctatattccctggccttgccaggtacccaaccagatctgtattatctcatgacccaaacaagcttcccgctgacctttgcacgtttccagtcttaccactcctcaggcttcccagaccttctgccgttggtggttctgatctgtgcatcactctgggaagagggagagctttgggggcaaagcatgccaggtagaatctgtccagggaaggggtgagttgagggacggtgtggacagcaggtactccagggtctttcccaaacccgtatcttgcctatcaatcaaaaatgaagctttgtgtgtcttgcatttcaaaggcatgctttagccacagagaactttctggaggttcctccttgcactgtggaaacattatttagcacagcatcttaaatgaggtaggcggtatgggaatatttgttaagtgtttgagaccatcagaagctgaccaccaaggaggttctgggaatttaactccattgatagggatggtgcagtgagccacgtgggtaccactgctgtccctcggtggatggaggacacctatagctcctgagcagacagcaaaatgagctccaaggagccaccccaggccagcagccagcctccagagttgtctgattcttcatggccctttttcagactggcgaaggctgggagcccagggcatcattagtatccttccatcacttcctcattagttcttagatagtgttttaatgacagcttgagaggctccgcatcctggcctccttctatttatgatccccaccgtgttaatgtgcacttaatgagaaattcttgtcttgcttgtaaatcctgtagccggcattcaatttattgacagatgtttgcttggatctctttaaaattacttcataaatcttcccagataaaaggcctcaagtttggttattaagacaaggccttgttgacagtttcatatttaactgtttagaactcagctgtcagggctgtaatggggtgtatggccaaggggcacagggcctgggtgctgtttgtcacctttcctgcacctatccgggccctccctggtggagtgtgtctactgtttcctgcaatcccctcagttaacttctgggtgacctcgctgtgccttgcacttattcatttagcatatcagcttgtcagtgtgatgaagtgttcctgctgataggcgctaagggctgagtaagccacagtgcctccatcaccggggagaagtgttgatgggagcccaacgctgaggtcgcccttcccacaacagccaccaggcaccagctggaaacctgtgggcttcacctccatctgtgggcaggaagcaagtggatgtcagggacggtggtggggggctctgcttggaagttttaagaccacactcatcttttgtggccatggacttttcaataccatcctaagtcaagattttttgttgtttgttgttgtttttgttgttgcccatgacagaaaactcacctcaaaatgacttaaggaaagagataaaggagaagaaagatagttaactggctcatgtgattgaagagtacaggggaaacgaccttcaggccaggtgcaagggttaaggtaattttgtttcactctcttcctagggtcctccttcctctgtattagctacactctcagatcctgtcctgcccccagcagctccacagggcttccggttcagaccggaagaacaggagaacagaaggccacgtgcttctcttccaaatgcccaggaggaaaaaggctaattaagtctcattggtcccaccaggtcacatgtacaggctttagccaatcactgtggtcagaggtaggctatgttttgattggttaggtctgagtcacgtgatgagttccaatacaagcacaggaaggaagataaggccagaggatgttctctagagaaaaagtggggctatgttacctgaaccagtcagcacacatgttcagatattctgatcaagttcagaacaacagcctgctttgtctaatgcttgcatttcattttgaaaagttgttatacattggcagcctctgagctgaactactgagggtgtggcctactcatttgcagagtgcattcaaaagattaaaattccagaaaaccctggagaggccaggccattgagaggtcctctaaacccacccacaagccggtaacagtattaagatgaaaaaaaaaaaaaatgctctgcttaatactatcacaaatcagcccattgcatgtaagacgataatgagcacttgggccaaaaatagcgtgttttttgcttacttgctggtgtcctgtcacattgcattgcttgaactgtgtcagatcgcattgagtaactttgcttaatccggcgctgacgtgacccgctgctttgcaacacttaagacaagtgtgtaggagcttttctcctcagtccattttgtgtgtgtgtgagtgcagtttaccagatgaggcatatgtaaatactattcgaattgaaaacacatctatttaagctagaatttattaaggggcctgtaggagtgaaggcacaagaaacatttactcacagaccccgacaggcttctacagaagactcactcctttgccccagaaaataccacgtttactaaattctgatattcacagtttcctatgtggaaacttctgaaaagtttagggcacactatggctgacagccggaaggtaaacttggctatgattttctgttgggccaactccccatgcccctgagaaacacattcttcacaaaaaataattgtaataggccgggcgcggtggctcacgcctttaatcccagcactttgggaggccgaggtgggcggatcacaaggtcagaagatcgagaccatcctggctaacacagtgaaaccccgtctctactaaaaatacaaaaattagccgggcatggtggcgggcacctgtagtcccagctactcgggaggctgaggcaggagaatggcgtgaacacgggaggaagagcttgcagtgagccaagatcgtgccactgcactccagcctgggcaacagagcaagactccgtctcaaaaaaataaataaataaataaataataataataataattgtaataatcttgacttagagttgccttgtaatgtagcctcccagtgggttctccttgcccactgcctagacacagccgatttatcaagacaggagagtggcaatagagaaatagtttaattcacgcagagctggctgtatgggagcccggagttttattgttattcaaaccagtctccctgaaaactcagggattggagtttttaaggataatttggtgggtaggaggttgaaaaatggggagtgctgattgataagtttggaaatgaaatcatatggagttgaaactgtactcttgcactaagtcagtttctgggtggaggccacaagaccagatgagccagtttatccatctgggtggtaccagctgatccactgagtgcagggtctgcataatacctcaagcactgatcttaggttttacaatagtgatgttatcctgaggagcaaattgggaagtttagaatcttgcagcctccagccgcatgactcctaaaccatagtttctaaccttgtggctaatttgttagtcctgcaaaggcagtctagtgcccagacaggaaggggatttgttttgggaaagggctgttatcgtctttatttcaaaggtaagctataaactaagttcctcccaaagttggttcagcctatgcccaggaatgaacaatgacagcttggaggttacaagcaagatggagtcagttaggtcagatctgtttcactgtaataattttctcagttacaatttttgcaaggagggtttcagtagtaataacagcaaacgcttatacaatgtttgctatctgccagttatggtttaatcactgtatatgttttaactccatgaatccctacaacagccctatattattaggtattattattattccactgagaaaactggggcacagagatggtaaataacttgtctaacaacccataatattcatggagttgagatttgaacccacacagtctgactccggagctgtgctccaaatactatatatactatgttcctcgtactatgaggttatatgggtaaacacactgactcaagattcatgccactaaatagtattacatgtattaaaatgtatgaaagatgaattaaatatatatataataatatataaaatacaatgcagatatatatgtagcctaagtattttttaaaactttctcttcaaagaattgagtccagatataataattcacaccaacaatgtttattaaaagaagatgagagaggaaacaacggcaaaattaaattttgttaaaacaataaaatgaagcagggagaaatgtaattccacaagaatgtattcaactaaaattggagtgaaaatttgggcctgaggatcctgaaagatacagcacaagaaaaacaggtgaagagttataatgttcgcctcatcccaaggttcaaagcccatgcctgtctctcaagacaagtccaagagaaatttctcccatggttcctctgatcaggacatggtgggtggtgaggaacatcactttcttttgaagaaagagagttggaggaggaccagggcctgatagaaatcccatgcattggtgtcaaaatggcagacccactctcttttcctgcacaagataatagggcctctgtttttctttccttatctgtacaaatgtgctgtcttcatttgtgttccccgagaatgacaccttgtatcaagaatttgagtacacattctttctttggttgttgatcctgggaaaccctaatagcagagtggggccataagacaggaagggaaggatgttaatgaagggtgagttatccagcctgacagcccagtgggcagcaggagcttccttgtgctggggaattctagaagagagtgtagaacacacacctcagagttatcccaatgagggctaaggatgctggggtagtttttaaccaaatcttcatctgtcattgcttggaagcttctaggggcattattctccagcatttccagcttgccctgtatgggaacagccagacaattgcccttaaccagagaagcacaggtaatcccagaagaatgcttgggagggagaggtacatgcctaggaaatacgcacaaggcacagaagaactctagcatggataattgtggcccttgcctcctagcacagttgtaatgactgaatggtaataaatagaaagcacttggactgctgtctgatttgagaaaaaacttaagagttggggaaaatcatgttggctcacaatactaaaacgtctaggagaaaaccttgaagcttcaggaaagggtggatccaggcactcaaatatattggtctaggcaagagcatggtgggagggaaatagcctgtgctgaggggtgcagagcttgtggaatacagatgaattttagagtttgatttagtaaagaccatgttgtctttgtggtccatttcatatctagtatattaagcagattcattgtcagatactcaaagtgaactcaaatcatcagtgaatgcagttgtggggcagggggcggatgagtcaacacaatttggcatcatgtagctaaaaccaccagtggtgtgatggatggtttcatttcttcttggactgttttggcattgtgtagacggagcctaaattggtgcccgcacctcacactaatcatgcccagagagagataacatggagctattgagatccccaagcagcactttggcacacacactatctgacaatatcaagagatgaaggaggcctttgaaatgagctttcgcgcgtgagtaatgaccttcaggatgtggctcaggattgtcttttgaaactggtatatcttgatggatgattgaaaagctgctgtctttggtatagttttcgtggttttatatttgaggatgtgtaataaataaatgtgtaattgccctcaacatgatgcaagaccaggaggtgaagatgacacagaaaagtcctataacagcataaaattttattaggctccccattggtaggcaagtcagtgttgtgtgaacaaagaatagtctgtcttaaggtgaccaagatagaaaccaatacagtgaggaacaaattccaccagctgatttgcagggaggtagaggagcgaggcgggcgtgaaggataggtactctcatttttaagatctttatgaaagtagtttcaggacccgtattaataactgcaacaaccacctgaaccattgaccttataattctgaagattaaccagttagtatttataaagcatttgatgttattttttcagttgatgggaatagctacatttcagtggcctgtaattcttaattcattgatgtcttcttcttccattttgatgctaaggttgattttgtgcccaatgtattaattacatgctttttgttttttattctttgtgatctcaactcagcttattacatattttttgtttcctcatgtgactctcattattggctttatacatggataaatctatctgtctcttctaaattaactttgatctcttttagtgacaattgatgggtgacaaccttagatattatacatggtgcctggaaactgggctcagctttcttttcatccccttttctttcagtaggtcaaagaatgtctttaatatctctgtataaactccattttgaagatttgtatgttaacagttttgtgctatcatctacaaaaaaggcatagacacaaaagtttaattgtagtcctaccttcttcaatccagtctagaaacttaaatgttcacaaagatttaataatattgtttaatgaatactaattcaatatttttcaaagctttaataatgtcatgtcataatatcattagaaaagaaatttttgattgttggttgccatatcactgtggtattaatgtgatttgtgtgagactaagatttctttttgtttgttttaaaccaatattcagttccatcatatctatgcataagacatgcataaaataagtggtgggtctattttgttttgttttgttttgttttgagacagagtctcattctgttgcccagtctggtgtgcagtggtgccatctctgctcactgcaacctccacctcctgggttcaagtgactctcctgcctcagcctcctgagtagttgggattataggcatgcaccaccacgcctggctaacttttgtatttttagtagagctggggtttcaccatgttggtcaggctggtttgaattcctgaccttgcgatctgcccgcctcagccacctaaagtgctgggattacaggcgtgagccaccatgcccggccagtgggtctatgtcttataacaagatttgtgttgttgttacacagcttaaaatagaggcatttgcacaaacctgataaatacaaatgtgtcttttggaaagtctctaaattcctacagctaatattttctatatcgtactatttagtgtttaattatctacgaacttcaattgatcacatgaatgttatttctctttggggatttgatctcaaatgtctagaacagtggttctcaactggggcaacttcatttctcagggcacattctgcattgtctgggacactttttattgaaacaactagggtggggaagctgttagcatctagcgtgtagaggcgagagttgctgctaagcttcccacagtgcacaggacaccgcccaccacacagagtgatccagcttcgaacctcaatagtgttgaagatgagaaatcctgcataggaagaattttgctttctatttcttaatttcttgttctggatatagtacaggcctgacaccctgtagatgctcatattcaatttgagaatgtggctgagtttgcctattaaatcaggaccccaagtggatctaagtgcagtggttttgattgaaagaaaaaaaaagtttttgcattcaatatgtatggatcatggggtgggggttgatacaaaatagaaaaaatatatagataaagaaaatgaagacatctcccaatcttttctgagattgccatcaacataaaaggcaggttattaatcttcagggtacagtctttgtatggagggaatcccttgggggttattggaaattttattgcttttcattggactcagtgtaaaatggggtaatttaggcttaacaaacaaagctcgggttgactcactttttttcagaggctccagaaagagaattctcacagagcaggaatcaaccttttcctccataaatcacaggaggaggtgagaatttggctaatatccagagcactgcaaagaaataaacaatgcaaagcaatctgtggcttacttgatgccagtttctccgtagataaatatttctgtgttttgatcttatacattcttccccctcaagctgaaactttttctgtctctcttccagtctgtctgttaggcgaggccttgggagcaggatcctgacaatgtactggtcagctcttttagggttttttttttttttttaaagttgatttcctctgctggtgagccatacatcactgacatccctgtctgtgctgcttgtctgtgacagaatgacaggtgtcatttgtcactggggcttgcggaagctgtgggaagagggattgaaattttttttctggaagggctcagtgtctgccagatcattaaaaagggggctttccaaagaaagctgtgtgtaatgtgattgcacttactgtcaacgataggctaaaagaaagagagaacatcaaaagggagtgagagaaagagggggaggaaagagaggaggagtttctgccaggggcatttaaagttcttgagctgccaatgcaaggatctgctttagttcagttctagtgtgtgcatgctaaataagtccttcagagatttccgctcagctcatggtgccaatgaggagaccgtaacaggaaacctctttaatagcacttcttctcatcacatattatgtagggcatggagacagacttggtactatacagggcatgacttgcagtccaatcattgaagagctgaggcaggaaaacctatttgaacaaaagcagagggtcccaataaatcacgaggcaaaactgagacctgctggcaggctccttctccaaagagacatttacagcatcctgtttgcataagcacgctcggaaaatgcccaagaatatctccttgcagcttctctcctcttggcatgaagtccgtcaccaaatggatctccagggatcagggaatagagtctgcttatcatttcattgcaaaggggaagtgttccttattctactccctgtgccattaaagtaataaaaagaagttaacactttcatagttctgcctatgtgccggacactgcggtaaatgttttacttatacacctcactgtaatcttcatagcaatcctatgagatcgctatttctgttttggggatggtgtcattgaagcacagagaggttaagtaacttatccaaggttgcacacttcttggcaaagctgggattcaaatctggatagttggggtctggagtctatgcttttagcctcttattgggagggtgaatgatgaacacagtggggaggccagatgattttgataacttccagattgcaaatctaaccatgctgatttaggaaattaacaatttagtgatgatgcaaaccagggatctgcaaactacagccagtgagtcaaatcccacctgaaacctgtttttatatagctggcaaactagaaagaattttcacataaatggttgaaaaattttgtaaaaatctgttttctcttttgttacataagtacctgcacatatcctcaatttagtctcttgtcttgcaaagcctaaaatatttactagctggtccttcacagggagtgttggtggcttctaatctaaggtaaaatcaactacaggaaaataaaataaaataaaataaaagttttttaaaaaaaagaaggaaagaaagagaaagaagaaaggaaaaaggaaggaaggaggagaggaaggaaggaaaggaggaaaagaaaaagaaggagggaagaaaggaaggaaggagaagatcttaaaaagagaagaaaaggaagggacttcatttaaaagcaaataagaaaactaagatcctcaccagtggagctctgaggccaacagaaacactgaaattgggctggcttaggtatacttacgtgggaaggccatcctttcaaaataagttttccttgactgcctttccacaaagcctgctgcttggagagacaaattagctattaggtaatctagttaattgacaagtgacttaactaattaccctaacatgcttattaaatgttacctttcccattctcaacacattgttagagcatcaatgtatttaaggccttatcatatcacgctctcttgacagcacattcctgttaaaacagaaggtgcatgcagtatgttttttctatcactatttttctccctctgtggttagagtcataagagatagaattgggagctgggtacataacaagcccatccctattaaggaacaatgtcctattatactggtgcctattcgctgagatggatcaagaatggactaagtaaagaaataatgcataatatcaagcctcggctaatgggtgtagctaaagcttagagaaaacttactttgactctggactagtctttcctagctgggagggctagtgtctatatttatacaaatctacaaattcctcaaccaaaattctttgaggcagatgtgttttacagttcagagttttccagatcttagaaagagaatatggtacatataccatgtagtagataatatcttcaggaaggaaggtgaggaatagcatcttgtatgtaaaaatataaatatttctgcaatgaagcattaggattactaaatgagatttttttaagctttaaaaagttcaatagatttttctgctacatgaatcacagaaaataagtttaaaaaaacttttggtattcagagcttttaggattttgggaatcaaagataagggattgtgaactagggtaaatgttactatcacctcatggcctttctaataactacagccttcaagttatttttaaattttatattggtcataattgatacatatggataccattggtgattattctttagcataatgtgagatgaagcatgatatatatcaagatacatacaaaataatatgtatgaatatatttcattataattaatgcctttataaaatactaagcaatacaagacggttggaagtaaatacaaagattctcttctgtttagaactgaactcgagggcaaggttgctgtaaaatgggaagcatcatctggtccaaggttgacaaactctgatttctgccagagccacgcaggtaccatgtactaaaatcctaagatatacatttttcacattacaacatccctgaagttaggatgcatcctccattcttcattgtacaatagtttgattggcaacatttttttttcactttcttgactgtgaaagtaaaaaagcattaaggagcttagatccaatccactgcagtctcagaggtgagccagggaactcaggtgacttaggagcttacacagtttctacacagggctcactggggctaacccaaattctgaccctgaccctcaccctaactttaaccctgaccttcaccctaatcttgaccctaaccctgactctcagcctaaccctgacctttatcctgaccctgagcttgacccttattctaaccctgaccctaatcctgaccctgattctgaatggctgaatggctgttgctctactggttgttgccacacagaaacacagaccaggggtggccaatcagatcttttgagagaagctagaaattcagccatgcagtctcacaagatttaactgttgtcatttattaaccctatgtaggacaaccaagacaggtcaggtatctagattggatctggccctccaacacctagaaagatttaatgagttgattgaccaatatcactctgctgaaatatgaaattatgtctgacacctatggttttattttttgtctgattggaatgacaggtgaaatgataaaagcataagcccagaaactcagggaactacagcagagagggagagatattcaagtaaacataattacatttataacatggtgtgatgctaccaggggctttgaggacccagagaagaattgcctaccccagtcctgtgcaggcaggaaagaacactcagagaaagtgttcaaagctgacagaggaatgagtagagggtggtgtgggagagaggttgatagggatattccagggaaagggagcagcatgtgcccaggtccagaatccatcatgcctcagaatgccttttcaaaaatgaaatcacccataacacaatcaggacatcctatgcagccgcatggaaccaaaatcagctgacctattaggaagttgataagagagaaaagaatatctgctgtgaccatagcccctgacacatcctatagctctgtagcgaggcaagcataaatgtccccagcctgggattctatcagagctcaaagagcaggactgttcctgcagtgtggccaaagcaggcagtggcctagagagtgctaggcaagaggtccctgtcaccaggtattacttcaaaagttgcatgtgccaccctgtccctctcctgcttggtcaaggctgtagatgaccacatcaaattgtatattgggatgttacagttcttggactgcaagcaggatcaactgacttggtaacttaaacaaaaaggaaattccttgcagggttaccagtaactcacagaatggatgtgaaaggtggaggactaatcttagaaatggttcaatgtcagaacagaccctgagtctagaaagtagaaactgcagaccagtttgttgaggtcccaccactggactaaatgaattgctcttcaaatttcctcattttcttgtcttctatggtcaagatgcaaatttcatgaaaagagtgtccagtttgcccaactggagccattagcttttgctgcattaaaaaaccattccaaaactcagcagcttaaaacagggaccacttatttagtccgtggtcctgcaggtcaataattttggctagactcagctgatgactggctggtcttgcgtggccttagataagatggttcagctcctctcataaggtctctcatcctccagcaggctaacctaggcttgttcccatggtggtagcagagttgtaagagcaaaagcctgtaagtccttgtgatctagtctcagaactgtactgtgcttacttctattgcattccattggacaaagtaagtcaaaaggccagcccaacttaagcaatggaaaaataaatgctatcttttaacagacagagcttcgcagtcacatggcaaaatgtgtgcatacaaacaaggccaatttaccagcaatcagtcatactggctaggggactagaacaggggacttgaaaaagagctttatcaggctacatctaatggggagtaagtagcaactcccccaaaactttagttttgttaggaaaggggaatgacctaagtgaccaaaaaaaatttttttaagaagtaaatgtttttttaacattgctcctatgtatgattcattagaaataagtgtcttttcccatgaacaaaatttgtttcagcagtaaaataaaaataacaaataataaaattaggtctcccagcttctcgtcaacttcctggcatagcaagaactgtgaccttccatgcacaaccactgcgggtgccctctcttgcccagttgaaggatccaaacagtgtggcccagagatttttgattcaaaaatcaatttctgaaatatatgatgaagttcatcaatacttttctttctggactactccagccctcattgaccactcctgtctttgaaatctgaatgcactgaaatctagaggtaactatgagagctgggcttgagtcacacacttcccgtatgattctgagtcagtgaacatctctaaaacctcaaggttcttatctataaagtgagtatagaagtgtagctccctccaaattttgtgagctgtcactgagacaatctatataaagcacatagcatagtatctcccgaataatcagcaaccaaaaactatcctttgcttatgccatcatcattatcattattgacatgcatttaattagttcttctgccccactagaaattatgacatctaaatattaccttctgtataaaagatgcctgtcacctcgatgtaagttgaaaaaaaaatagttaatatgtgtgagacttttgtttcttctaagacaggtgtttgaatatgcatttttttttttttttttttttttagttttgtcaggaactacataaaggttaatctctttttctggcaaatatttcctgagtgcttccatgaggactgcgtgggtagctcacctgtgattctgatccggaactggaccctccctatgaagtattattgtatcaattgtttgaccaggcagggaacacctgacctaccccagtaggtaataggggaagagtttaataaaaagacaatgaaaaggtaggagtggtgtttaagaaaccaagaagggatagttcagtgacctgagactggtgtcagaaaggaacctttggtagacgaacataggactcatggtaacctggtcaaaaggaacccgtgggatatatattcccgcctttcctcctcccacctgcccatcccctttgggcaaactccaggggtagccagaggacagaggatctcattgaggggatatatcagggacagtctcccagggcacaggtctgggaaggagggtgcagaattaatgtacagggcaagcagaagatacccgggacagatcactgaagattgagggaaaactcaatgcacaatatcttcccactttgggaagacccactctgaaaatgacttcactttttaggacctgggcccaggaaaaattacaaaaggttttaaaaccccgcttactagggaattttgcacatttcatttcaggagatgggttacctggtagatctcaatgttgtgatagactctacattggcctcaaaagacaattaagacatgatcctgttttaagttaatgagaaaacattccatcactggctgtctgggtcacaaacttgtagcctacaagacaataccacccctggatgtttctctaatattttttaaaactttaattaggtattggctaattaaatataaggaggttttacatatgtctctaaatgcctgtttcttttcagaagttagaaacctgaccccaagagtctcattttctcctgggaacaaggggctgcagctgagagtgtgcaagctctccagcttgccacagtcctcaccattctctgttgtctctaattagccagacccacgtatcctttaccatttttattgttcttgcactctaaatttcatcatggtaatgtttctttttacccatatctctatcagcaatgggccaaaaaagctagttgaagagggtcagtgaattttaagcaaaatttaagaaaacatatgtctctgtggaagaaaagaatcttcctacacttatatacacaaaatgatggtgtctgcctggaaggatggcaactcagtgggccttctttggttatcttattggcttgggtcacatgggcacttgggtttgcagtcctgagaaccctatccttttacattcaagtcacacattccagaaggagagcacttttgtatgcaccatctcacttaaacctcataatgaccttgtgaaacaagcagagcaaagcttatcactctttaacctaagaagaagctcaaaccagttcagtgattttcccaaggttacccatccagcaaatgtcaggactaaaacccagatctcatcatgaagggcaaactcccatgattcagagacgactgaggcttgtgtagcccagaaagaaaagaattgctcaagtttgtcctacatttcaggatgaaagaccaaatgtcgtgatttctacactgtgctgaattaatactttttcttaattttttttctggcctacttcatttccccaataggttatattctaaaggcagtcaaagattataagataacgtttctgtaggtagggggaaataagagctgttgaaatgacctgagtgtcatctctatctctggggacagataccatctcacgacttctatctgcctaagagaagttaagcaagaaggtgcagagctttattaagcagagaaacattagacctttcagctgcttgtgccatctaattacctgtgactcctggcatcacatgcaagctttattactgcatgtgtgaaaactgcaagtcctgctttcgtatctgccctttgaaactcctccaaacatctacctctactcaattttcagtacagctagaatcttaccctctatgagcaaagaagctaatttctcaattatgcttgaaatttagtaattctaggaacaattttttttagagcttagatccttatgggcgtaaaacactctgattgtgtttaaggattctaccttttatcagtgtctccagtgggtttgaacagaattacttcctttggcagttttctggaactctctataaattcattttactaatgttctgttgaacaaacctgttctatcctccaacattgagttggtttttttttttttttttagagacaggatcttgctctgttgtccaggctggagtgcagtggcatgattgtagctcactgcagtctgaaactcctgggctcaagcaatcctcatgctttagccttctgagtaactaagactacaggtgcgcactaccatgccacgccccgaattggtatttttaaagaaagtattctcatcatgaaaatttctgctttgctataggaagcactagataaagttgtttggttaacaccaagtgaaactagtgttatgtatagtaatgcatctcaacatatttactctatttgataatgaaactgatttacttctgcttttagagagagggagagatgaatggatggttccttgagtgttcttcatgtatttatttatttattcaactcacatacattaaatacctactttatgtttcctaggcatttgggggtcgcaataaagagtagtaaaggttcctgacctcaagaaggttatactctaaagggaaagagtggtgggcagtcacagccacaaaccaatgaatttcaggtagtgaacactgtcatacagagagaaactgagaaatttgagtgggggattgtgaattgctgctgccttgggtggattagtcaaggaagatctcatttgaggaggcgatatttgaacaagatctgaatgaagtgaggaaggaagctgtggggccgtggagggaacagtgtcccaggtggaagaaaacagccaagacccggaagtcaccatgggctttagagacagcaaggagacccggatgtctggagccgaatgaggaaggcaaaagtggaagaggccaccagggggcagactgtgcagaacctatgggacttcataaggactttggatttcactggaagagtaatggatgaggctagaaggtttggggcaggagaaaagcatcatctgacttacctgtgagcaggttgactgcacaccggtggatggaccgtggtgggggtgagctgggagcaggcaggcaggacagggctgtggcagtcggtagtggctgtggctgggctgatagtggtgggctgatagtggtggaggttgtgagaaatggttggattgtgggttaatttttgaagtttgagcctatcagtgggagaacaggacactaagaaggacagagtaagtggcgtgtcctttaaatgagatgatctcaatatccccagaaagtggctcctgtttttactctatcaacatccatttccaagaccctgcctcattgcctgtcagagtgtcgggccctggaacgctccagctgtgataatgtcgtggccctcaaggaccaccccctccccaaccatggagggacaagctaaatccctccttcatcaccaccgcctgttccaggccaccatgggtgcacacccagacttcctgtagtagtttctcccatggcctccctggctggtctttgcctcacctgcccactttgcacacaaaagccacaacaatctttctttaaaccttaaaacattctttacattgactctccctcttttccttcattacatttatttttaaaagaaattttatttcataactatacagggaaaattagcagaactgacgacagatagaaagtaaacatgaaaacaaatacgataggtacaaaacaaggttgtcgaattccagctcatttatttgacagcctcttaccctcacaaccatgctttgttatgaccattatctcattttaatcctaagtaaactgagtcccagagagatcaattgatgtgccaaagttcataaagcaaggcagggaatgtaccaccctagtttccagagttaaatgccaggctgagcctgtgtttttgtcttttcctcatcctctatagtggagtcagcaaagtacagctcatgggccaagtccagcccaacatctgtttttggaaataaagttttattggcacacagccactcttatttgttgacgtattgtctgtggcagcttctgtactataatggcagaattgagtaggtgctacagagaccatgtgaccctcaaagcctgaaatatttattatcaggccctttatagaaaaagtttgccaacccatgttctagatagaaaaaaaaatgaagtacatcaaagagaataagttatagttcatggaacacacataatgtctattcttcccatgactgcaacaaaatgtcagttaaagagaaataaatgttttttcaatgaatgatttaaaaaacaggagttaaaaaaaaaaaacaggaaaacacttaagtgaccaaagtcaataagttttctattgttcaaaataggaattgctcttatgactttattctttcagttgattctgacagtaaatttattcattcatttttttcattcatttgacaaatatttatttaatgtctataccatactaagccagtacctgtaatagcaacagcatgttccatgctgagcaaatctgacatttttcttgcctgaacattgctcacctctggtgatagacacagttgttagtcaaataattataaaatttgactagtcagggaagttggaggaggctttcctgaggacgttgtgtttgaggtaggagctgaatgatgagcaggtgaagaggagagggaagtccatcatcccagaagggagggtccacatatgaaaaggcccagtggtaggagggcacatagtaggccctaggaaattcaaagcaagatgcctgtatgtctgaagaacagaatgcaggaggggcacatgggagagaggagattggggaggcaggtatctctgaccatactgggctaagaatttcatgttaaagagttattctccatcctaagaaaatggaaaacattgaaagggctaaagggggtggtagttttttatgggatgatctttcaccttcatgggttcaggagtccacatcaaatcccttatggctatgccgagtctaatccctagtcgtgcaaagtatctcttctctgtgttccataatcatctgttgttcagttcaggcatttacagtattgctggagccaagtaaagcatgcacaagtgcagtaataagacagacattttcagggccgggggcagtggctcatgcctgtaattccagcactttgggaggctgaggtagacagatcacttgagaccaggagttcaagaccagcctgaccaacatgacaaaaccctgtccctactaaaaatacaaaaattaacttggcatggtggtgcacacctaaggcatgagaatctcttaaacccgggaggtggaggttgcagtgagctgagattgtgccactgcactgcagcctgggtgacagggcaagactctgtctccaaaaaaaaaaaaaaaaaagacatttcagtttgccctttctagatgaaccatgtggcaaactacacctctggaaacatttttcttttgctcaccataggcccatcttctttgaatgtacatcttcatctatatattccctactcttaatctatttctttataaggtgctaataggccaggtgaaaatttccactaatctattaataaaagcagaccagtgataggctttaagaataaagtcatgataaagttagcaaatacagaggggaaagaaacagcaaaatgtttggggttttttgtttgtttgttttcgagaacattgctacttggttccattagactcctttgattgtacatgacagaaaccaactctggttattttcagcaaaaaaaaaaaaaaaaaaaaaaataggaggtaatgcaaggctatctgatggagtggtatttgacttgagagctcattattgaggaaaaacccagccaaatgaatgtctgcggaatgagtgttctaggcagtgcaaagatcctgaggtgagagcaaaagaggtgtgccacagggttggaggaaagacccatgggtgggaggagggtgaacatgacggggagcactcagactgatgagacagggctttgtagctcatggtaaggagttttaatttcattctctgtgatagaaagccttacatgtgtagtagtccgttttcacagttctataaaaatactacctgagactgggtaatttataaaggaaagagatgtaattgactcacagttctgcatggctgggtaggcctcaggaaacttacagtcatggcagaaggcaaaggagaatcaagtaacttcttcataaggcagcaggaaaagagagtacaagcgaaagaggaactgccaaacacttataaacccatcagatgttgtgagaactcaactcactatcatgagaacagcatgaaggaatccgcccgcatgataccatcacctcccaccaggtacctgcctcaacacgtggagattataattccaggtgatatttgggtggggccacagaaccaaaccatatcatagggttttaagtaaatgagtgatattatttgagttagagtagagaaatatcacacttctataaacaattactatatctcaggcactgtatatccaccttaggtccttttcctttaatcttcaccaatgaatgggtacaattattatcacttctcagattagtaaagtgaggcttagggaggaaaagcaacttgtttggagtcacatagtgactatatggcaaatctgaacctcaacccttgtcatctgcctccagttcctggctcaaaatactcattaaaggctcatttttattgccattgtttatgatgtttatttttctaacccttccaagagtgttttgtggattgcattattcttttcttctcaattttataaataaaagagactcgcctcaaaatcacaactgaaggaaaaaaataacaaacttgtagtttcctctaaagaacttcacggacacccagctcagaagaatttggcccggccagggatggggcggggagggaaggactggctgccgcaatgttttgggttcggccatcccatttgtgagaattaggaatgttctttggacaaaagatcaaacacaagcttactcctttctatgctgagacgttgcccactcgcttcctcttttgtatctttcctggtaactcgacttcagtttctctgatggtaaagagatgagatcagccactaggggatcggtcgatgggatcaggtttcagtcatcaaaaaattacgtcaagtgctaagcatgagttaccttccactgccagtgtcagcccaggacgtgactgcagggccatcaatcctgccttccttgtccttgtagatgttaaaatacagggtactctgggaattcattagtgggggtgttgcatgggaaaggaggggctatgctccaggaaaagtgggtatagaggcagagatgtagctttctaatgctgttaccttgcacattctaactattaactgcagagacatctgctgattgttttctttacaaagcgggggagggggagaaaataagaaagttaatttcagagttggaagcaggtttaaaatgaccttcgtcagttataaatataacatctacttacttttaaccagtttatttccaattcaataacttttattgagtgtttccatcataataattgtttttaaaaagtttactattagaaagtactgaaaagaatgtaggaaaacaatttcctccatagtcctactatacagaggaagatccattctgtttcctgtctatcggcctctctgctcctcttttaaatactgaacccaacttttttattgtttcaaatgatgtgactatattgtacctatgatttgtgtgataggcgtcacacccaggaggtgtgatggtccccacctgctgagatccctgtccttgtgtgattttatcctcttgaaagtggatggacttaccctcctctagtaaacagaatatggcaaacatattgggatgtcacttccaagattaggttataaaaagatggtggcttccatcttaagtgcacgcacgctctctgtctcttttttttttttttttttttttttttgaggtttcagggcatctttggtgccacagtagctcaagaagagccttttattttattttattttattttatttttttttattatactctaagttttagggtacatgtgcacattgtgcaggttagttacatatgtatacatgtgccatgctggtgcgctgcacccactaatgtgtcatctagcattaggtatatctcccaatgctgtctcttgaatcactcacgctgggggacagccagtagctgtggtgtgggctatcctgtggtttggtgagatactgaaggcgtcactaggcagtccacaagcctgccagaaatcacttgccaaaaactacatgagttaacttaggagtggactcttcattcccagtggcttgactgcaacctggtgagagattctgaatcagattcactgagctaagccccttctagtttcctaaaccacagaaactgtgagataataaatgtttgttgttgttagttgctggatttttgaataatatgttacacagcaattgataactaatataattttttattctggttttctccattaattatgtcataagcatcttatcaagtggttatattatattgtaataaccatgtttatgtaacatcatcaagtaggagtatttatacttatttattgcttatttaatctctcctttattacaggacatttactttgttctgttttttgtactataaacaccactgtggtgaacatctttttatgtagagcttctattttttttttagctattatcctaaaatagattggaattagttttaggattaggaatcagcttggattactggatcaaagggtaagaatatttgtatttctctggatttttattacacaacttctccccagtaggagagattaatcaatacactactaccagaaatgcaggtcaatgtctacttcatctcacctttgccttttattttgattattgacaatttgataggcaaaatatttcatagtttacaactattaaaagaaagagatcattttcctggtcacctttcttaaaaaaaaaaaaggaatatacataggggttgaaatactgagataaggaactaaatattaattaactagaagaagtgctgtccaatagaactttctgtgatgatggaaataccctctatctgtatgtctacactagtagcactaggcatctgtggctgctgggccctgttagctagtgcaactaagaaactagttattttttgaattttattttattttaaatgcccacatggagttagtgactactatattgaactgcactgttctgaaggattaaatgaaatactagccttctatagaagaaagcagttgaagtttgagacactgaagctttcgccttcctaacaatatccccttttccctacgcattggctttaaataggatgtcccatgggtctgacatttaaatcatagtaacattatttccataaggaattctataaaataaacatatgttgcctaccataaaaggacacgcttagagggacctaatatcattgatgtttgtttgagatgcaaggatccttgattgatggttatatgatcaccactttcatttaatctctgcttctactttccaatatccctgcctagtggtcttgcaaaccattacacttgtcacagaggctggcatgaatgagtcgatggatagatgagtggatggaagggtggatggatggatggatggatggatggatgggtggatggatggatgaggatggataaaagtaataataacagctaacactcatagtgtgcctattaagtgtcaaaatttggacgcaaggttttacctgcaacatttcattcccattcaatctttgtaacagcccaaagaggcaagtgtcactaatttttcctgtctgacagatgaggaaactgaggaaataactagtaagttacacaggccatgtttgaaccagatttgtctgccttcaagccttttcctaatcaattatccaacatcacaccatgaagctgtgaaatacagcaccatgcattatttacaccttgtcacattgtcgtggtggcgattgaaaattttctcctgcaggtagctacagatgctagggagaaaatgctcaaaactgacaggtacctcacttgtctctaaaagtggctctttcactttttattgctgaccaacttctaatgtgtcagtgctatactaatgtggttaactgtttgcctggggcagaaaaataaagcttctgacatgcaattaaaacctgtcttgcccaattgggcgactaatgagatcagcaagagtggaagctgcctagttaaggcgtagtttgtgtctcagatccatttcatggggcaagtgaaagagtggccaagtggagtcgcctgatggtgaatttgaaacataattaggtagtcctcccagccacccttgactgcccatttgggtccacatgcagactcactcacaacggtgactgcaaacccttgcacagccacttaacactgagctcctttctgatgggctcacacagcattcccatcattctgtcctctggcctggacactgaagttcatcacaaactttctagtttcagatggtggcatatgtttagttgtcccgttcccaaatctgtgaactctttgttcctgcaatgacttatcagaaactaatacaagttgaagatttgtctagaatgggctgtgacgacaactggacatctccaccctttgaggatattgctgggagcttagagtccttgttagatttccccatccttggttttgttattaaaagatttctcaggaggtattggggcagtttcaacatattctattaatcaagttagttttgatttactttattcaacaaatgttcattgaaaaccaactgggtaagaaaaattctaagtgtggtgcacacagacattgaataaggcgaatttgggctgggcatgatggcttacacctgtaatcccaacactctggaaggctgaggtgggaggatttcttgaggccaggagtttgagaccaacctgggtaacacagcaagagcctgtctctacaaaaaaaactaaacatttgaaaaattaaaaattaggccaggagtggtggctcatgcatgtaatcccagcactttgggaggctgaggtgggtggatcacttgaggccagaagttcaagaccagcctggccaacatggtgaaaccccatctctaataaaaatacaaaaattagtcaggcatggtggcacatgcctgtagtcctagctacttgggaggctgaggtaggaggatcacttgagcctgggaagtagaggtttcagtgagccaagatcacaccactgcactccagcctgggcaacaaagtgagactctgtctaaaaaataataataataaaataaaaaatcaaaacaaaaataaggcaaactctctgcctgcatgcagcttacaatcaatggtttgaaaaagacaataaacaggtacataaatatctgaataggataatctcagatgctgctaagtattatattaaaaaaacctgataatgtaatagtgaatgactaaaaataaaggtgggaacaactatggagacaacggtcagaggaaggtgacatataggctgtgaccagaaggctgagtagtcccagtcatgacaaaaatctggaggaagacctttctacacagaggaagcagcaggtacaaaggtcctggggtgagaatgagttgggtttgttctttctggaaaagaaagatggtggctggagctcaatgaatccagaataaagtgggaagatgaatgtagaggccagcagaggccaagtcacatatgactatgctgtctgtggaggtgagcttttattctacatcaagaaggatatagtttacatctactgtaaccagacactaaattgagcactttatatacattttctcttctgatcttcacaccaaccatataaggtagacattattttcactatataggtgagaaaactggtgcttaggcatgtttaataactttcctaaaatcacaggtaggaagcagggaagtcaggcttcaaacctatgtttgaccccatcactcattctcacagtcaccaagctgtgctgagatcagactttgtgtcagggtggagaatggtagggagtaatgttttgtttgtttgcttgcttgtttgtgtgtgtgtgtgtgtttgtgtgtgtgtatgtgtgtgtttaataagggactctaggtattcctcatatcatatcaattggatggcagtttaattcataatgtcttaaacattgcaatctcaaattgttcttcctggaggcctgtgtgtttgaatgagaggtgcaagtggtgaaggtggcagagaggtgaactttgcagcacctgtcaatgcacgctcccactgggtggggtattacgtcccccgtagagtcatgtgaagttatgacaaatgtgacattagcaccaaattggaataaagaagacaaagttgaacatgtgaataactgtctttcaaggtgtttctttatgcccaggtgacaaaaagtccctggtacatttctgtctgattttctgacaaactgactgccacaatctggcagggagtggcaatagtcgccttgccagtcatgggcaacctgatttgttggactgcagggtctgtctggcatcagttggtcattgttctttttggcatcatgggtgtgtgattatgtccagaaggcaagcaaacctcagtccccgagatcaagtgcactctcaatttgatttgttcagggtttgtccaatggcactgttgacatttttgtctggatagttgtttgctgatggaggctgtcctgtatatcgtcggacgtgtagcccctaccctcagataccactagcacctcaccccaggctgtgacagacaaaaatgactccagacattgttctatgtcccctaggagccaacctccccacctgagaaatgaaaaccactggcttattcacatagtctagtttatgagaatggaatgtgttcttagttaaactccaaaagagttaaaatccactcaaatataccaatcctgaagctagaaataacatctatggctggctattcagagactttgccttagaaaacttatgatgaatactggaaaaattgattgaatatatatggattccatgacatactctgaaagatgtttttgcttgtctgtctccttgtattaggataattaaggctagctggtgaaacaaacagctaaacatctcagtggcccaacacagtaaacatttatgtttcacatgtacaaagttgatctccacgtggtgactcagatgcaaccttctttccagggtagctctgccatctggagcatgtggcttccaaaaccattgaaggtgtgaatgagttctgtaactgatgcccatcacttcttccctcatcccattggccagaaactgggaagagtggtcttcctgtagcaagagaaagaagaaataggatttggcaaacaggtggcatcacttctgctatcatcctagatatcggcttttcagtttattgaataatgttcaaaatcttcttgatttgtaacctgaattacaaataaacaatagttatgacagtacagtcttccctaaacatgccaagcatcagaattacagactcctcacgtcctgcccatccattccaatttgagaggtctgaatgaggttcaggaatctgtaatttttacttgctccaggtaagtgggatggataggtatctaggactcactggtctcagatccaagtagtcttacatcttcatttttactgcccttcattaggttaagaaattgagagttggttctcacctttctgggctttatttgaaacaaaaactgtattgtcagctgggttcagctcttcctccaatctggtaaactctccaagccataattgtaccagcttctggcctctcaacgtcattgctccagccgtgttgagctctagtctcccatgcttccttgaccaatgctccacactgctcagtaatctcttaggaaatgcaaatctgttggttttaattctttgcccaaagtcatcaatgatttcccattgtcctaggatcaagtccagatgttttattatctacctaaaacccttttcttccagctctcttttttaactacatcgccaaggctagcatggttcctggcatatagtaagcccctcaaaaaaatctgttgcatgaatgagtttgtagaatgcactgaactgtgcatatatgtaaatttaaacttgtcagaagaattagatgtcattccccctcccctttttaaacagaatccagtttatatcagttcttcacagtgtcaagaactcaagtcttgagaatagttgtctatttttatagaaatttgcatatcaattaataaattttgcacatgtgcatgcccaggtatgtgcctatatatacattgtatattatacttatgtaaaggtatttatacacagttatgtaaccaatgtatggtatgtatacttatacattcataagtaaatatattcaataaatgtatgtgtgtataagtgtgtatatttacatatatatgcccattttttctgatctgcataccaccattgaagacaagaatgctacttgtcttcaagaatgctacaagaataactactgtttggaaaacagatgtgaaaactgaggcttgcagaggaaaatcaactctagcagagccacatagctagtaattacagagccaggttttgaatggagatctattcagccccaaagtctagactttgtctttcgattacactgcttttctagggctatgctgcttctaattccatgttaacatttatactgtaaacagaatcgctgttcctcataaataagcaaatgaaattgacatctaggctaagaagccgtagactgcagcctgtatctactgtaatgtgattctgaaagagttttgttcattttctcttaggatagatacagttttgtatttcctagcaagcgtatgccaaaatctgagtctgcttccttagaagtttggcatctcttctctctcctaagatgaaccagggtttctgaatcttgacaaccttgacgctattgaaccagatactttcctgctatgatggtggtggcgggggccggggaggctgtcctgggcactgtacactgttgagcagcatccccggcctccacccactggatgattgtagcacctctcccccaggttgtgacaatcagagaatgtctccagacgctggcaaatgtaaccccagttgtgaacgctgaaatgtgtggtatgaaaaaaggtttctaatcataatgctgagcttagcggtactaaaatagacctttatataatgaaagggcattggtttgtcttccttaaggtgagggatattggatgttaggacgtcagagtggtgtttgggcccagctctagccttgcccaagacacacgtctctggctctccctcctccagtcccaaatccccacacctttgatggtgctcctctcaaaaggaaggaaagacaataaaaaatgaaaagaaaaaaagtaattaaaaaaaaaaaacacaaaaagatatagtttcaaaattacatgtccttacagtctgtccagctaatagaattatgcaccgcagctttaatttagacatcgagtttcatctcttacttaaatgtatctgtgtgttttaataggaacattcagctttgcttttattaatgcaaaaacattaaggcaccagccctcgatccgaaagccttaaagggctgtttccaacagaacctgtcataaaatgtgctctcaagcgtgtcccctttaagagactccagaattaaatgttcccgtatgtgaattttattttgtacagcacatttgctttatggctacaattaagttagatgtgccgataacaatgtctgttttccattttaaatcgcacatttcagacagtgtgcattgttttattatctaatccacatgcttttaattgcaattatggtcccttatgagtcccctgggagggcatgattgcaattaaaaatgtaatttaaatgttaattaattacattcattttctaaactgggaaaatttcatttattattttcatgtgttgtgcacttatcctaaatgcattaccttctaaatgttttttttttcctaaattaagtgttatgtttataaaacagggtgtttaataccctttaaaatttttgtgagggtgtttgtacaaattattactttaaattaattgattctgagctatatgcaggagctatatgtttaatatataataaaaataattttgttgacttttctgaggctaaaacatggtatcaaaatatatgtttttctcatttattttctggttgactttgatatggaaagtctacttcttatgactatcattattattgttttttcttaaacaaaggaagaaaggtattgttactacaaatgatacagatcattaataagaaaagggctttccccctagatgaaaattgcaacctctaaagaagaaatttataggtagagtaataagtcatcctgcctcatatgaataaaggggaacaaaaaaagaaccacaaggacatgaagctttaaaaatcattgtaacttacgaggaaaaaaaatgattgttgtatgcatatctcagtttatccagtcagccctgtcatttttctgtctatctcactttgcctagaacaagagggtcattttagatatgaattataaagcaatgtctatctactttaaactctgaaccatatcaattttggttggttttagtgaattaaagtgtaagtcccaagaggacaagggcagaatttgtgtttttcccaattcaattccaagtatatgctacatgtgatcaattaataaaaaggcttttgaggattttcttttttccatttgtttcctcttcaattggccaaatcttcttctagctcttttattttaaaaatgcctgctatgtctgaactctagctattgtttgggttttatttttatttttattttttagatttaaaatatttaaaagatgtcttaggaaaattctagtcagttaacagtttaagctgctctgtgggtagaggaggaagaaataagagagaaaagaaaaagttcccagacttacaacgttcaacaaatacttatggcatctttactctggagtctaagcttgaatcgtttgtaaaatcgactctgtgcctcctctgggccagattatgttgctaaatcctcacaaccatcctgtgaggtgagtactatcattatttctgtttaacagagaggaaactgaggcacagagcattctggtaacttgctaaagcttcacggctagaaagagggaaagccaggatctgtgccttggaagactgactctggacttgatattccattcggtcctcttcaccagagcatggctaagaaacactagcaaacttgagggaatcacgagagtggactccacacagcaggtagagaggaatgataggaggtaggctctgaagacaagctctgtgggtttgaatctactttgcatttgtataaccttggacaaattaccctccctgctgtaagcctcaatttcctgttctgtacagtggaggaatggcagtacctgtctcataatggtcttgagctggtgcatgacacataatgaacacagtgctcccagcacaaggaaatatcaactgtagctgctactattaaatagagctctgccttcaagaagcttacagtctagctgagaacaggagtaaatgatagaaggccagggggaataactttaacaaaataaaataaagtagattaaaataaaaatcaccaaattgtccatccataaaggattggccaaataaactatatcctatccacctgctaaaatgctaggtaagtatttaaataataataaagcggaggctgggcgctgtggcttacacctgtaatcccaacactttgggaggcagaggcaggcggatcactaggtcaggagttcaagaccagcctggtcaacatggtgaaaccccgtctctactaaagatacaaaaaattagccaggcatggtggtgtgcacctgtaatcccagctactcaggaggctgaggcaggagaatcgcttgagcccggggggcagaggttgcagtgagccgacgtagcgccactgcactccagcctgggcaacagggtgagactccatctcaaaagaaaattaataataataacaataaagcagatccatatggatcaagcttttaggtatattgttaaatgaaacagtcaacagtctgaacagttgtgtaactgaaaaggggatggatgggtgggtgggtaggcaggtaggtaggtagaaagtatttttgtaaatgcacgatcatgttctggaaagatatgagaccatacacagtgatgatttgggggttggggctgccaggaaggtgtgtggaaggcacccaggatcttgttttgttttgtttgtttagattttatacctctgtgtgtagtgtgtgtgttttacaaagtccatgtgatacttttaattttagatagaacttcaaagtatacacaaacacatacagacagacatacacacacatacacatacccatgaaggcatggccctgaccacagggaaattcaggagggagaggaaggggaaatggagaggaagagacatctcaggatgctggagtgaccagcatggctttatctgtgtgttgtcctagctctaacggttttagcatgggagagatgtcaaatgggctagagtaagaacaaagcgttagagctaggatagggttgtgcgcccagccagaagctgatagagaattaaggggaaagttggccccttgggtaatatttaaatctatgaagaataaaatcaagtagaaaaagaaaaaggaaaacaagagattccttgccttgagcttcagatctaaggagaaactttcacaaaccccactagcagttgagacctggggactcaaccataagtcttgctgtttgtcaaaagcaacccttcataggccatgtcgaataagttccagcatttttaattaaattggggccagtggaatgggtcacagatggactgggctcattttcaaatctgcttctgctaactgtgtgccttgtaggactcagcacccaccttctttatctgcagagcaagaatgataatactggtgggtggatgcctatcaagctctgagttgtcaagcctggcactcaaggcttagctatcatgacgcctgtgtctctgggacatgctcagggttattctcctttaggctctgccttggtcacgtgggttccaacaaaggaaaatgtaaaatggaatttggggtgattcaagtccacggaggggcagtcccagtgtaatatttagacaaatccagagaaatgcagcactttttaaattgggtcccaaacaaaaatggcatagtggtaggaaggaggcagcgtgaaggaggaaatggatcaagagcaggagaaaaataaaagaaaaaatgaataggaaattgcaggaccccatttctgagggtctgaataaataatctttcttggctcttcgttttttcattattttacaaatgtctttctctcgatgagtttctgtttgctggcttttagaatgagacgtaacgggggcagcaagaggatgattcctgactatgttatagctccctgggctttttcttctccttctcctccttcttcttctttcttttttttttttttttttttttttttttcaacggagttttgctcttgttgcccaggctgaagtgcaatagcacgatctcggcttgctgcaacctcctcttcccaggttaaagcaattgcctgcctcagcctcccgagtagctggaattacagtcgcccaccaccacgcctggctaattttttgtatttttagtagagactgggtttcaccatgttggccaggctggtctctaactcctgacctcaggtgatccacctgcctcggcctcccaaagtgctggattacaggtgtgagccattgcacctggccccctgggcgtttttttcttctgccttggcccttggtggttttgtctgatgctcaatggccagaaggaaacacacccttgtgcttatatcaacggctttcttccaggaagcatggcactgctttcagagcatgcacacattgttatcttgtctgttcgagggaagtcaggtcagtcttctcatctgtctcccacagataagcagctgaggcagagggtggattggggtagggcagatagtggctgctccaggccatacagtgaatcaggaattagtgccagaatgagaagttccatcggctcctctagattgcttggattcagattggtggtaccccgacctacagacttggttagcatgtcacaaagactgacttcccccaacctttgttgcattcattcagctaaactttactgggcacatgccagctgcctgtccaggtgtggggaatccttcagtgaacagaacagagccttattctcatggagattatttgctagcaaaggagacccagagtaaaaacgtaaataaataaacaacgtaatttcagatcattacaagtgctgtgaagaagatgagtgtgcacacacccctttaatccagatatttgacactgactggacagagttaaattccctccttgctctttcattcacaaggtgtttgacaacaggtgctgaactgctggagttactgctccttagttctaaggtcatcttcaggcttttccctctcaaatgccttttccacattttcctcctattttctctccctctttcttttacccgttttcccctcctgtctgtatcttctccctgataagcctcaaagaatgcctcatagactgaaatagttctttgccctcatccttaaaagttgctgaacacctgtagccagcaggtgtcagagggacagtgctagaatccttttgggaggaggtgtctgctaggcttagctcacctcattccccagtgcagggagccagcgggtaggtttctcaaagccctcttaattgagggttgctagggagcattgttagaatgaaaaaccaaggggacgtgactgaggactcccaacctgtgcatgtttcctacagcattgattactggagttggtgaccggtactggtgcaaaactccctaattatttcacagggcttaagtcaagagtaacaggatattagtgatttaatcaacattgttatctctaaattatatttttatttagaagttgtatttctttgtttctttcttttttttttttttttagacgaagtctcgctctgtcaccaggctggagtgcagtggtgcaatctcggctcactgcaacctccgccccctgagttcaagcgatcctcctacctcagcctcccgagtagctgggactacaagcatgcgtcaccacgcccagctaatttttatatttttagtagagatggggtttcactatgttggccaggaaggtctcgaactcttgaccttgtgatccacccgcttcggcctcccaaagtgctgggattacaggcacgagccatcgcacccagccagaagttgtatttctttatgtatttatttttgttattattgtagaaattatattgtagaaattttttgttattatcattgtagaaatgggagtcttagtatgttgtccaggctggcctcgaactcctggcctcaagtgatcctcctgcctcagcctcccaaagtgctgagattacaggtgtgaaccactgcatccaaccactgtatgcatctttgtaacctacctgccttaccaggggtaaaaggacacctaaaccagctcccaggaaaacctctgtccttacccagcatggttttagattccaatacaggttaaaattgccgtggctcatgtgaagatgaagagttagtataaattgttagttcaggatttagtggagtgcatctcaaattttaatgtgcgtatgaatctactggggatctcattaaaatgtagattctgattcagcagatctgtgccgagattctacatttccaaggagccttcactggtgcacatacggctggtcctcaaaccacacttgaagaagcaaggctttagacttgccctttaattccagttctttcttcagggctgcattaggtcttccatgaatccttggcacctttaccttcggggcccctcgcatttaaaaagatattaaaaattatatcctatgattacattagtatacagacaaatatgttaatctacatttaagcagtttcttctatctaaaagttcattatttttcttctgattttaaaataaataaaaatctggtcatggacccacacataatgtttctagggacagttcctaggtgctctccctacagtgcccaaggtaggacttgatcccaatgttgagaggagttgccccttactgacttcatgctgaaactctcagagcctctatttcctcatctgtaaaatggggatcacagtatctctcgcactgctttggctctttgcacagtgcctggtgcattgtaagcactctggaaatgttagcttttgtctccaaaagttacctggctccccgttagctgtcactgtctcatgacctattaaaagtcagatcctacacacatcactgctgctctcttaaagctgtttgatatgtcctactggttgcatgacctggataatttccataaattaacctcttttaccttccatttctgcgctaccctgctgttcctcttctggaaggaccctatcatctcttggacgcagcagacagcgatgccacacgaacttctgccatgacactcggcacctcccgcgagtgctcagacactcatctgcagcttgctctctaaactcatcatttctgtagaaaggcagcacagcccctgatggatctggaattaactgtcgatttttctgcctgtcactctgagaagaggaagggaccatagagctaatcacatgaggcatcaccatcactgttttcatgttcttttgtttatcttagcccctgactcctcttgattgtacttgcctcaatcctaagactctgtccattgtaaaacatgctgtagatttggccaaagcttttttggggaggagtgagtgagaggtggagaaggaaccctcgcatattaaatgtacacacaaattgcatcccaatttcatgtggaaattaaaataaggtgatttcagagtgaaggaaatgcaatcatgttttatggagtttgataaaatcccatagtctcattaaggaaatagtcatcaccaggatgtgggcctcactttataagaagatagagtaaaatgaagcttaattttcctttgtaatatttttgatacttccaaatagtgatagcatccagtcatagcatcgccaaatgatagatgcagaatttgctataaatttggattttcaagctatatcctttttcattttcttctataggaattcctatcacatgtactctttgaagtagtaatgtaagatcttaagttttcataagcactttgcattgcaattcagagcatccactcatgcgaaacataagctgtagttttagtgtgatttttttaaaggggaaaggggtcaaacccttgccagttggtcaaactcttttctttttagtttatcttcatcacagtccaaatctttctcattgaacgggaaacattttctgatctcaacctttattgatacaaatgttgatttttttttttttaaggaaaagagtatctccttcctcaaaagggatttcatttgagtgtttctttctcattttcttcgaagtaattcttccaaattgacccacaccacatcgagtcttggtctccactgccaacctcaattataaaatggaaactaggtgaacaaattatcaaacctctgtatgggaaatgtggaaaacatttagaaatattcaccaagatttacttccagccatcatgacttaatcacaggtgctgcatccgtaattttcaccttacagaaagtacataagcagctttgcagatttcagtgctaggatgccaaaggatccagagaagtcataggtgagacttcaggtggacaaactacctggacagttgacaaggtttccggctgttccagaagctcacgtgccacctgagtaggcttactgagtgatagcccataattgacaggtattacctcttgactctgaacatctggtctcccatttactccctcccctggttcttctgtgacccatcgtcattgtccaggcggccttgcctgttgaacatatcgcttgaccagcactgcttcctggatatctgtagagcctttggcatacccacacgtgtattttataaaatttaagttcaaactaaagcgtgctgggggccagagaagataaatgccagcttttttatcgtcaaggtaacgataagagattcactagaatttacatagcaccaaagtcgatttacgtgcttatttactctgttgttctcctttaaaaaagatggagttaccctagcaactgtaagatcacgtgatgttcagaataaccgtaatggaaacaccttctgaaaggaaaatacgcatttcaccagatgcatattataggcacataaactgtcatttatagaatgtcgaaccattttggaaatgattggaggaggttcatgtggcattgagtactttccccattaattacttcagtagcttcagagattctgtgacaaaagaaagagattgggagaaagggagggctttggatcttctcctgggcatgttgatagaattgtacactgtatctcgataagcacagcagcagaaagagcacattaccaaaatccatctttcattacatttttgcatttgggtagaatctattactctattcaaactttgttccaattcccaggatgatggcattttccctagagggatggtttgctttgtctaaagcagaatactcaaagggaacaatccgaagtagaagaaacccccaagaaatggcttggtcactcagccaattgggtttcatttcagttttacaaattaatttgctgaagtccagggtgagatacaggtttatgcagagatcacaccagggcagcccttcctgattttggttcagtcttgcatgctcaggataaataaagcaaccctggagaactctgtagttctaaaactcatgtaggaggggccacaactgccaacatccttctcctaacactgctgaaatgtatttgattaggagcacaccattcgggtgataggtacactaaaagcccagatgtcaccaaagcagaatgtatgtatgtaagaaatctgcacttttacccctaaatatattttttaaattaaaaaaattataaaataaaatgaaaagatcacttgttaacacaaagcaaaaagggacaaggagctgccttactgagtcagacatgtggctcctaggaattggagcttttgttttgcagaataatataaattagatcccatgatctcctatccacgatctcatatccagaccgtctggataggagggtctgccctttagacttagctaaaaccccagccaattgccttatttcctggtccctccccttcattgagtgtaccccaccatttctcacctttctttttcacatgttcctcctttccccagctcttcgctgtctcagtgtttttgcagttaagtttctcctaacttcactgtcatctcctggaagaacttaccctggccccgctagataaagaatctcttctctacatccctttttctcttttccatagctccagtcactctctgaaatgatattgttcatgggtgtgtttgttccttatctgtttccccaacaagacaatagactccgcagggaaaggaccatgttgttcttttttcacaaaggtaccccagctccaagaagagtgtctggggtgtaattgctgctgtgtacatatttactccacaaacaacagactggaagacagtctaaatagattctgtttctgacagatcaaaggaaacaaacagaagttcagcatctctcttgaaaacaaatacactggacagaaaaaagaggtctggaaagatggactgagcccacagacacagaaaagcatctaacaaatcaggggctctgaggagtgaggagtagggggtcgttgcttttatttagaaattaacaactgtgggccggacacggtggctcacacctctgatcccagcactttgggaggccgaggcgggcagatcacgaggtcaggagattgagaccatcctggctaacacagtgaaaccctgtctctaccaaaaatacaaaaaattagccgggcgtggtggtgggcgcctgtagtcccagctgctggggaggctgaggcaggagaatggcgtgaacccgggaagcggagcttgcagtgagccaagatcaaacaggagaaagagaaattaacagctgtgcccagacagccagtgtggctgaccagaaagactgaatttagcaaaacatggttttaaaaaaattaaatgaatgaaataggtgaagaagtgatggtagcaacatgtgggcctcaattctctgactttttatttgatgatcttaggatattatgcatcagtccatgttgccccatcaaacacctactacgtgccacatatagtgcctaggccggcctgccttcctttccttccttccttccttcctcccttctttctctccctcccttctctccctccctccctctcttccttttctttctttcttccttccttttctttctttcttcttctcttcctcactccctccttccctcttgactccctccttccttccttctatcattttttctctccttcttccctccctcctccgtccctgcctccctccctctctcccttcaatatttagtaaatcttcattatggctccagcatggttttagagcttcagtcattcattcatttgttcattcatttaacaaatatgggcaaagtactctgatccatgcaaaagtggattatccagtcatgagccacctctgcatagaggtaacgaggtgggcggggtttgccctcatggcatttccagtctaaacagacattaaacagttacaaatgattgactaaatgattatttaatggtattaagtcaagtaaagggatcaaattatttaacacctgctaatgattaattaaaatggtatacattttgccaaagaatctctctaacttttggtaatctgaacttctctctttccctttgataaacgtgctcagagtaaaaaacaaccaactaccaggagggttttctgccaaatttgttcccagaatgtttaaagatgagtgtctctcatcttttcctctgtaattcattctctctctgtgtgtctctcctctctttgaacagggatacagcctatgtgtgttcaatgttctaataaccccaaatttagacacaaaccattatttactgatatttaatgaagtcacctcatggcgttttaatgattgctagatggaacaaatctaatgattgttaagatggaactttacaaaccctttcagtcaggacaagtggcctgttctccccacttctccttgaacttggtgtactgagcaaaagacatgcaagcaatgaggttgagactcatttttcaacattacccaaagaacagtgtgtactggatccctggcagctgagaaaggacccttcccctggctgggagacaaaacttcaatgaaattagggcattctcccaacccaaccattcccaccctgtgctgatgtgaaaaagttcaaaggatattacgggcaaagctctcaagatgtgtttccctcgagaatatttcaggtcacccaatgtgtaagggcccctttgaagtcaagattgattgaaaaagcacaagggtgtggagtctaagaatttggatgtggccatcctctgcgtccctgagtgaagatgctgctcgggtcagtattcatattagcctggcccattccctttgcctgcggtatttacagtaacccacatgcagagcaggtggaagccaaagcggggcatagccagggattgtggcaggggcttgaaaaagtgttttcttttaattgtagggggatgattctgtttggcaggattcaaggctcagctgtgtgtgagcagatccttcatacacaaccacacacacacatatactcagcttcctctcacatttctcatggaaaactgatcacacacagctctcaggagtttcctggaatgcaggataagacattcagctgatcagtgactgacatactagggacctgatttcctgaaattaaagccactgccactgccttgtatcttgaggcaacacaaagtattgtctttttaagtttttattttcacaaggcagcatcgttagagtagccaggatgggtcaaccattcgaaggaaacaaaggtgtgagagcaaggctgctctgcagattgcatccacttctctggatgcttttgggatgtgggtggctccagtctccccgttggcctcaggagtgttatcctgagagaaatgaagggagtcctgcctggcagcaccattgcccacaacgctatccagaagacgtgcaatgccaaggccaacagtcagttccctctcagtcgcttcacctcctgaatgcatctcaacttgtattttgccttcatcctgccatttttctctctttgtggcctcttgtgggactgtggctttgcaacacagcatcatcaaataaatcatctttccatgcattctctccttccttcaccccttcccaatcaccaaggtcagttgtcctttatggaatttgaaatgatttttggatttgattcaatcaacaaatatttgctaagcagctaccatatggcatattctgtaccatgtttctgggaatgcagtggtgaacaaaaccactgagataaatgcatttgactgactttttctgaattttaacgcatcttggagttactgtgttttggaggtcaatattgtttttctgagcattttactcctttttaaaaataatcttttttaaaatgacagaagcaaaatgtgaattttaaggcattataaaataggaacaaacataaataagaaaataaaaacatccatcacccaaagatcacactactaacatcagtgcctacttccagaacattctctgtgcatatatgtatatttaaacacaagactgtaatagacatgctgttatataacctgctattttcagtcaacaatctctatttttcattttaataatttttattgtttttaatttttctaattttataattttttgagacagaatctcactctgttgcccaggctggagtgcagtggcacagtcttggctcactgcatcctctgcctcccgagttcaaacaatactcatgcctcagctcctgagttgctgggattacaaccgtgcaccaccatgccttgttaatttttatatttttagtatagatgggatttcaccatgttggccatggctgctctcaaactcctggcctcaagtgatctgcccgcattggcctcctaaagtgctgggattacaggcttaaatattcagaccataatcatattcttccagttatgccataaatatccttttcagctggattggtcggactgttcctaaattcaggaacacgtgttttatccagttgttttgtttatacattttttaaaatctttcatctttttatgacccagaattatagaagagattgagccaattgttttgaagaatgtctttcctctgaatttgtctgggagctttttactgtcatttagcctgtttctccaacccctgtagaagtgatgcataaaacctcgtgggttcaaattggacatttatttttctagaacacacccgacatgtaggctctattgcaatacatctgaaaacacaaaatctgtttgctccaaaattggtgatagcctctgacttaagatgatggtggccaggcgaggtggttcaagcctgtgattccagcactttgggaggccgaggcaggcagatcagatcatgaggtcaggagttcaagaccagcctggccaacatggtgaaacctcaggaggctgaggcaggagaattccttgaactgggacccaggaggcagaggttgcagtgagctgagatcacgccactgcactccagctggggatacagagcaagactccatctcaaaaaaagaaaaaaaagaaagaaaagatgatggctgctgcgttgctccattatacaggtacaacagtttacccacttgctgctagaaagtcatccctatggctctattctcttgctaaatggatgttcagttgcccttcaaccattttcttaatggtttgaacactaattaataatcccttgcttgtatcagtaatttaattgagtttttaaatgatactttttccatatctatcagcagactacaatcattttgttggctcttaactttgattctttcatcatggcttttagaactcaggtgaacattagtccaagtcgagggttactgtgaatggtgccatcttgggactggcacttgggtggatttcttactgacataaagagggctttaatcagccctgctgcaaacgcttccaatgtctctcctttctcactatgactaacattgatttggcttctccctatcacacgctcttattaacttgattcatatttccctttgatgtaagctggtggaaggctggggccagcttgtgttgtccagctgttgctatttgtgtgcatctctctttccatctccttcagtggctccttgcaattgtccatagcaggaataattataccattacaatcatcaaatgtttcaatttaggacattcttttagagctgggtattaaagatttaccagctcaccagtggtttaagccatcggtgttcaaacctggctgaaactcagaattgcctgaagacttttctacaatacaactttcaaaaacccactgcaaacgtactgaatcagaaaccctaggcttgaagctctgcaagtctgtgtctttgataaaatactgcaagtaatagtttgagggtttggggtcaagcagtcagctctaggaagaaaactctatatgtgctcacatccatctcactttttctgagtggtctcaggttgccatcctcaccacctgtattgttttcagggcagcatgtcaaaccgaggtacccccattattgaagaaggtttcttttcacctgcctgcaggcattcatcacaccacctctcctctctgccacccgcctttgctttgagtcttttatcccatttccaagtcattctctgtctggcatccacctaaatacaaccacacgggggagggaggcagcagccgtattaacaatctcccctcatcaatcacttgggggagagttacttctttgcaatctaaacatgaaagcttgtctcctcttgggggcagtgtgtgcgcagggacactagggtttaatatatatatatatatattttggggccaggtcgaaagaaacccctagggcataatctccttaattacacttctgccatttttcatggagcctggtagttcgaggagcccctttctttgtgtgtatatagccaaaatgagttttaagctgtggagggagcaacctaatcaatttccttggcctgggccttttagaatccaatatagcatagatacaggacagtgataatgatttgacactcgccgcacgtctgggggctacacatcgctggtgaaaaaatgtcatgcccagatgaatactgttggcctctggttccaacacaacaccaagaaaacattgcagtattatgagaattcctgttccttctgtcgatacgttcaagatggttcttacttctgagcaggtatcgattgtgtataggttaggccccacctgtgccatttgtcatttctgatataatatcgtgttatcgtttaaagctgtaatgggagaggtgtctgtgtttaaagcaaaccggtgtctcgagctttgataaatggctagatggtctttgtttctgcagcagtgagcagttggcttgctatttgctttaccttttatccaagaataactgtgtgaggagttctggaagcgagcagtatcattttgtcagatgtggtccgtggctagccgggtggtcccagcagaacagctgtgggattttagcacccgacaggatgttagcagagggcctgtgtaaatctgaaacaactcaagctccacatggctgcatttggttgaaaagttctcagtgctgtttttttttaaggtgagaggacaggaaatgctgatgggaaagaaaaaaaaaaatatgtgcttgggataataattttattcagatggagcatttctgagaaaaagtgatctgagggaaaagggtggtgctatcatgagggaaaatgggaaatcagtaaagtgtggctgtctctaacatatgcatacctcccatctccaaaagcgtggctcaggcagctcctgctacccttaaaccacccgcctcctggtaacatggctcaccctctccatatatcattagaaccctcagaaatgtggcacgaagcaagtctggaagactttctgttcctggaactgaaggtattcgtgggttacaatcatgacacttaattcatcagaacaggcagtttgtcaggacaaatagcagtagttttgtgcccacagttcccttctcaaaattcatgaaaaccaaaatgctcccacaattccaatgcgactttgcatggcggcaatgactatcatttctctctgccttctttaagggggaggggagggccagccatgtatcattacataaatggtacaacatgcctgttcccccagctctacagccgaggggacttttggagaagcgcctgacatgaatctgctcctaactgggagtcgatcaagttattttcagaaaagttcaccaggttttcaatgttcagtgtaaaatctacattggactagagatacaaggcaatgctaagcaaccttgtttcctggagcctgctcttcactttgatttctctaggacagagaagctttttggtgatgagtccatactttctcaacagcatctttctaaattaatgaaatgcacttgctagacaatggagagggtctgtagaatacacaagggctatgagacagaataaatgtccacaagccttgttaggatttggtgctagtccatagaagaaataggtccaaataggtatataattaaatatatatgtctagctccatcttacacacacatatacatatgaatacatattaataaacattcatactctcataaattcagtatacctatgaaccagctgcctaagttataagaacgtaaattgcctatatatatacggttcttacgtatataagaacctgattagcaagtacttatatgtatcaatattttaaattatatacctactgtataccaggcatatatgtacattagtgcatttaatccttataacatgtctatgaggaaatatgattatccccatttttcagatgacagagatgaggttggagagagctaacattctttgctcaaaagcacacagcttagaagtagcagattctttcctcatgccatttctaataggtcacacaaggatttgcatatcatttatttattgtacatgtttgaaattatgacaaggtgtacaaatgtaacgagaaaaactttcccctgaaattctaaattcagaatctagcagagttctagggaaaaagatttccatccttttccatgagctttccagagcaaagaaacctacaccttggaaggcccgttctattaaaccagaatatgcaaatagctgcaagaagcaggtagatgacataagtcaaatggaagtcagaccataaagtggtgcagacaatggtgaactccagggcacacatttaaactgaaagggaatctctgttcagctctgtgcaagaaatatggactcagtggtatcagatcacctgatttttctgtttgcttgttttcagagaaaatactctgtagaaacattaataatggtacctcacatggttgttacaagaattaactacatgattattggtagaatgcttggaacaaattcataaagtgtttggaacaatgcctggcacattataagcaccatattcagaccacatattagtatcctcatcctcatcatccttttccacatcaagagtgtaagagccacgtgagcagagatgctgtctctcttcttcagctctgtatccctggtatgcaatgtaaagcaactgctcaggaaatatttatagaataaatgagtgatagaaaggaaagtacaataaaatgcacttatccctgcttgattaattcttaaatgtctgggccagacacaatggctcacgcctacaatcccagcactttgggaggccaaggtgggcagattgcttaagcttgggagttcgagaccagcctgagcaacatggtgaaacctcatgtctacgaaaaatacaaaaattagctgagcgtgatggcacatgcttgtagtgccagctactcaggaggctgaggtgggaggatcacccgagccagggcaggttgaggttgctatgagccatgatcatgccactgtactccagcctgggtgaccaaacaagaccctgtctcaaatatatatatatatatatatatatatatatatatatatatatatatatatattttcttaaatgcctctgtttctttttgtatatcgctatctgtgtttctgtgtgtttaggtctctctttctctttctttctctcattaaattaaaataaggatgagaatagattaccaggcaagctggcaaaatggctaagtaggttgtccaaccagttgtttccttgcgagctggtatctgaataataatgtcccacttgaaccacacagcccccattaatgacttacaccaagggggttcaaagacaggaagtggcagcagcagcagcaacacccctctagtggttctaatgatgcagggcgagggtgcctcttgctcctgggcagaatggaaaatggagtagagagccccaatccgtgtgcagaggtgccgttttcaacaaagaaatcctgccattccaaactgtcgagacctttaaaaataaaagatgtgctgtatttccagcactattcagtattcatgaggcttcgcagcttgttgtaaggcaagatgaaaacaatactcagtagattttcataagtgacatgtaactgcaagattgatagatgatgcagttttaatgtatgtgaagttcaaaaccaacataaaagcttccaggtagctgaacaccggatttcaaacccacatttcttccagtgataagccctagactttccccaagtctcctgcatctataaaacaaaaagtgggcatcaccctaccgagggcagaatttctactgagcctccaaggacaaaggctgggatgtttccatgggtgtagcagggggtcccagggtacattttttttgtgaaatgaatgtgatgaatcatgaatggttaaatatcactatttgcttctgctaatgaatgctaaagaaaaagaaggttgaccttcctgatggttcagggagcacagaaaattagttacatttctagtcatttcccaaaacgtccttgctgtatatctcatagcttcttggccactctgggtttgttatgtattatcaaaatatacacacgtatacatacacatgtgcatatatatatatgtacaaatcaaacattattacgtattgtattgtatatgtaatgtatatgacctatgcagttaaatatattattcataactatgcattatacagtgaatatagggttttatgagttttcatggtcagcctcaattaagcaatatttctctactccattccatgaatatccattacataacattcatgaaatgttataaaaagttaaactactggccaggtgtggtggctcacgcttgtaatctcagcactttgagaggccgaggcgggtggatcacttgaggccaggagtttgaaaccagcctgggcaacatggtgaaactctgtctctactaaaattacaaacattagctgggtgtggtggcacgtggctgtagtctcagccacttgggatgctgaagtgggagaatcacttgaacccaggaggcggaggctgcagtgagctgggattgcaccactgcgctccagcctgggtgacagagccagactctgtctcaaaaaaaattgagttaaactacacatcttcactttggaacccttctttccttttgtcttatcacttgttccccagcactgattgaatattaggacctgtcaagtaccgaacagaaagtactgtaaggaagtctgacatagacacaaagagatgacatatgttaaagagaaatatacatacatgtcagcaggcatacatacacatgtgattgtttctatattgatgagtcttcctttcttttcacttattctttgtcttttttggaggagagtgctgagattgtctctttttattttgctttggttccagtctagttaactcaaaatgcatggggttagaaaaattaaattaaattttaaaaatcacaatagcagtgaacattttataacattcagtgcttaaagtatgtgcaaaacaatcttacaaggagataatattattaacttggttttatgaacagggaaatggaggctcagagtggttgatcaacttgcagaaagtcacacagctaataagcacaagaggttgatttttcattgtacctgttaaatagacatcagcgagatgcaagtgccagagcaacataatggacaattttgagatccacgctgttctaacccttctctggctaaaaaaaaaaaaaaacaaaaaaacaactttgcttgtgcatgtcagacaagaaggcttccaaaggacaaggacaacctcctttgtgtattacattgtcactttctaacacagggcctggcacagagcaaaagcttagtaaatgtagagtaaaaaagaaagggagaaagtggtaaggtggtgactcccttgtgggcatttgggagctggaaaaccaatgagatctttccaattttaaggtgagcacaaaaggaaggacaatttagtgtctggaaaaaaaaaaaaaaaacccacaacaactggtctatgaattggctgcccagagaaggggacagggcagaatgtaaagaccaggacagaagggctctcctgggtgtctcctgacagaagatgagagaaggaaaatacacaaggtgaggtatttatctcgaggtctctggcttctcattggcaatgctggaatctgaagaaaacctgggtctttctcctacaacttgagctcacatctcctgattttcatcattgggcaatttttccaaacttttcattgttttggctggatcctgttgagaaagatgatttttctcagggctggaatacaagattcctcaggttgagataggatctaagccagggatgctaaggtgtcactgagttcaaagtgggaatcttctatgatctttgcccatgggcagagcggctgtgccagcaggtaaacaccacagtggggacatgcggaacgctcttatccactctacttgtccataggatggtgtggaagaccccaaaacagagtatggtaaccacctacctgtgtcgtctgtatagaaccatgaagaatgttcctcctttgggcaaagggttttaaaaatactttcaaaaaaaaaaaaagaaaaaagaaaaaaaaaacaccacctctggtttcctgtattcagaaaaggatctcatatcaactcctagagattcagagaaaaaataagaaaatgtttccagtcttctgtttcctaccctctttgtcttgttcccttctcctgggctgacaactgctccagacacattgccgttcgcaatcctgttaagtcaagagcatgtatccttaggggctctgcacccaggcagtggctgctgtcatcaactcgttatgcactgcctttgccccccaacacacccccttttgtaacattcatcctatttgttctctcttttgtatgttgtctccctgtgacactataatgtaattgatgactggaaccagatctgtctcgttcatcactgttccccaaatctaaccaagaaggtgcctagaacacagctgatgttaaataacttttttcaatgggttgaattcatacaggcacccaccctttcttttcagtgctcgtaccacaggaatggtctacagcctggcaggggctcagtgtatatctgttgaataatagaagcagcacatcagagattgccactgccatccgctgtaggaaagcaggtctcttcttgagctaagaggaaacccatgttgagttgacaataagagggaggaaccttgaacctgagggagttgacagtaagagggaggaaccttgaacctgaggaagaggagtcagtttctctagcattccgcataaaagacaaagtggacaacggggaggttctcatttccctcctcctcagtgctcagactttggaacacaagttgtattgcttgacctatgtgtgtcttttgaccacctctgatgattcatttatctgatttgagtgctttcctgatggaaaacacagtctgttggatggtagttcactgattccctcttgatgtccatcatctctagtgatggccttccatgagcacaatggcaggattcttgaccagttccccgaactcttctgttttgttttgttgatatgtgtcttctgttttgttgggagcctgctgttgcttacatagaatgtcctctgccactggtaatgaccttcatgaaagaggctcaaaccctgatttgtaatctctaagagcagcctcccacgaggtaggatctcccagctgaggtgaatacctctagttggcttttttaaattaaggctccacattgtaactagtcaacgtacattattgggagagtgaatgtcaatgccactgcgttttctttctctcctttatctttgtcagtgattcaaagacatgatttatggttagtctccgactttcagcatcatccatcaagtcctggtttcactacagggctccacattgtaaatcataccgaagggttgtcactcattccccttaaccctttaggggtatgtttcagggtcgctgtccaagaaggaaactttgtaagatggcagttgagggggcttgggcaattgatagggactcattaagtcagtggcattaattacttcacctaatgtgatcattattaaggcctgggtaaggcctgggccagctccacccagcccaggcaggaagagaaactcgctcccggtgacttgagaaacacacagattcctgaaccagctctattctgttttgaaatgtccattatggatgtgaagtgctgagtttcactttggaatcaatcacaggctagttctgattgtgaccttgcaaagattacagaatgagtgcaaagacccattagcagctgctatttcaggctttgtaaattaacagtcctctcctcctcccacactttttttcatgtctctatcactctgtgactctctgtccctttgtcaccttcgggaaggtggggattggtggcaaggggtgagactgaaacttgcaggcagaggagcaggacttttgcagggccagatctccccttctggctgattccagtcatgcaggattaaggctttgagacatggcacacctggtagaagcaaaatccaggcaactggcattgaatgaatgggcgtgctcacctaccagaagtctgcaactagtaattgcgggtcattaatgaaaaaataaataaatatatatatatacacacacacacatatatattcttgggatctatttgttcagagtctgcatttggttgaaagcgattttgttcctgaattgtgcatagctctgttttcccatggtaagctgatgaaaacaactatattggtgaaagatatacaggtaaataaagtgaaggtttgtaaaatatgaacgttcatcatctaaactgtgttttcataagaactcctcctcagatggtgcttgaggggctcaggacttggatgttttcaaatacaggtcacaaatgtgcctgcggtcttcatttttccaaaaattagcacttatttagtcttcaaggattaaggcacctcagtttaccaggacagtgaccctgacgggtcccctctttacccagcattctcactttccagcatacaaagtggctagtcttaggattttatctttcttggaaagagcacaaggatcttttcaaactttaaatgacccagagccatgaatcctcctaacagccttggaaggcaggtaaactgttgccgaactagtatttcacggagcagcccttctctcttctgccctccctcctgctcagaaatcagatttatatggtatacacagtgtctgcagacctaactgcaggtgacttagaaacggagagcctgcagattaatgtgcccattcagaatgatgtattctatttttttgtgctaagagcagcgtggatggctcgttgggaaggcataacaagggggccagtctcggcttctgcgtcgcagcctatcacagaaagggcttctgtcgggtctctgttgtgaagtcagctactgactgccatttgaattccatcgatacgacgtcttctgtttatgccacatggatttcattatgcctctgatcaaaagaattttctaggcgctgacaataaggaagcaagttgttcagctcatggaactaatagacaactttgagagtccctttccctctcaatgagcaagaggaattctcccttctcaatattgtctgtccctagaataattgtacatttctgcaaatcttgttcaggccaagagacaacatcccggaggcatcaagaatctgctgctaaaaaaaaaaaaaaaaaaaaaaaaaatgtgctttcaacaaattagaatacgccacctagtgaagttcttaattagcatggcacctcagatataaagttaggaggcctgattgcggtcaactcaccccgacctcttacttgaaggaacccggaattataggaaggactctggaaagaaaaagaaaatgtaattaaattaaaatagtcctgctctttctgtctgaacctagcccattactatgataccttgtttcatgatgtcttgtcggaagcatttagaatggtgaattaccccccttttaaaaacaggcagacaaaaaatatatatacgatcttattcacacaacatgtgggtcagtgttttctggttagcatcctgcctagaattccaggtatttctaaggtattcaactctgagtggtgcaagtcttcacagatctgtatttggtgaggcatatttgccagatttgccatggtggcaaatttaaataaattgtccagatgcatacacattaatccactggctggaagccaggaatatgcagtacagcctcagcttccctatgtccaatttcccctgggacttttctttttacacagaaaatttcaagctgtgtgtgtctaaacacagaagttgccttcctccttcctaccttctctctccataatcggtaatttttcctcccatcagccccatcctcgttttcattttgtcaaataacagtgtgactttgtctttgacattaaacagttgtatatacttttagcagtttgtttactccatctgtatttccaatcagcgaggaaggtttaccaaagtggttcattactgatttatttatgatgtatttagatagcaaatatgaaactgtcagcagttgctggctaaacagtgttgacagacattaataacatatggtatagcaatggaattatgatcttttaatttttaaaaaaattttgattctcaacgtgcagttttgggttttgcatttcttaggtaggtgcgtgcaaaggagaagacttttaacaaaactatgttttctttttatttgtaacctttggggtttcctgttggtgacattaacatcttctgtgtctatttagctgttcaatttaatggaagacaaatcctcccaaaggtttaatttactcttgcaaactgaaatcaccgtattcacactgtgggaaatggccctaattttcccaaccttcagttgccatcaagcatataatttatttctcccccttcgatacattccccattagaaaacaaagtttttgatatttaaatgttaccaagttcaaacggaggaaccgagtctcccgtttctgcaaaatgctgttgcaggcatggctgcttctacctgacagccacccatttatactgggccagaacagacaaacatttgaatttctgacctttaattggctgttcctttgagcttatatggttttttccagcaccaagggaggacatttttcagctcaactcaaaggaaaaacaacaagcaaacccaggtagcagtaaaattcagcccatttgctttgaagtaagcatgggcattttagccagaaggtgacccgacaggcaataaagtttctctttggccaagaattcttccatggttccgtaaagatgatctcgttttccagactccaattcgttcccttgaatatgtccaaaggacatgaaagttaacattagaaaaaaaaataggagtcttctagggcaggaaatatctgtgatggggatccattgagaatttggtaaaagctaacaccttctcactcagcatacacataagcattacctgtaatttcagggttctggcatcctgggaagcccatccagtgtctctggagcccagttaagaatcagccatcattcaggtcattacgggatttttgtgtgtgaagtacaagaacttgccttcattttctaaggttagagtggggaagagatggctcatgtgccacatgaactgagtacctctggaagctcttttagtgttttatacacgttatcacactggatcctcaaaacaccctaggaagtaggtataagacttaatcccattttgcagatagggaaattgaggagtaatgaaattgaaattgaggtcacatagctgataagtaaaggaaccacacgtcaaatctcaacactgattcctgagccaagtcaaatgggaaattttgcttaaaatgaaaaatgtaagttaatttataagcttttaccttcttgatttttttttcactatttcaaaactgcaaagcatattggaaattatccctttcaaatatcttactttacctttgaaataactaaacccagaggaactccaagacttgtcctgagttaaacaattagaggctgagccagagctggcttattccgacttgggattcagctttgataatcaatgccataccatgtccttgggcatgttaaggcttgaacttaaacataatggtggctagttttgaaatatatctaatattttgagaatattaatgacactagaaaataaggatcagagagccatctctgtcctaatcctaatcccttcactgctgaaactcacaagaaataataaggtgccccgactagagcacacacttcctcagatcactattggaatcccacctctgatgcccactgtgtgatgttaggcaggccccagcacccatctgagtgttgctgtttttcccatgtaaatggcttaaataaagcgttctatacaaagccatcgttacagagcctgacgtagagccaacattcattaaatgttagtttgtagaattatatttattacaagtgtgtttagaactaaaatcaagacatgtggctgggagcagtggcttgttcctgtaatcccagcactttgggaggccgaggcgggtggattgcttgaggtcaggagtgaaaccctgtctctactgaaaacacagaaaatcagccaggcgtggtggcacacgcctgtaatcccagctactcaggaagcagaggcatgagaattgcttgagcctgggaggtggaagttgcagtgagccaagattgtgccactatactccagcctgggagacagggtgagaccccatctcaaaaaaagtaaaataaaataaaaaatcaagacacatgaatattgtctattcaatgtagacatcttctacagtccccagtcttcaaagccagagacagcgaaactccagtatcacatcccaacacatcaagtctctgactttccttatctctgacatctaggggctcatgtgactaggttaggcccccactggataatctccccattttacagtgatctgatttgggagctcagttacatctgaaaaactccgtcccagcaatgcctagactagtgtttgtagaacaactgggcaaaggtgtgtgtagtgtatatcgggggcaggaagcgtgtgagccaggaatcattttagaattctgcccaccacagcctcagtcttctaatctgtcaagtggggatgtgcagtggtttctatggcacaggtgcctgtgaggagtaaatgtgtatacatcacgtagtatagcatgggacataacacacatccacgcggtaccttgcagctatggttcttggaagggaaaataaaactcagatgtggaatagtttatcagatgagggtagtttagagctcaatcctgggaggaacaaccaatcaatcaatcagcaagaacatattatggaacaccaagacgctttgccagggattgggtgcgattgccagaagctgcaatggatggcgaggaagagctgcttcttgtgggcgggtggagggggacttcctcagggtatacacagtctccttgggaacttgccatcttgcctctcctccctgccacagtggcaatgttcatgcagtgtcacatgaccaaccaaggggtgggtttccaggttgtgtgacagcgagtgcaagggccctgaggtgagccttcacctgaaaaccaggaaacaccaaggatgccagtaaggctgagcacagtgaacgaaggagagaggggaggaaactgagtcaaatctgggagtgattggaaacttgaactttgagtattttatgacgttacggataactgtaattgttactatttttttggatgtgagaatgcttatgtttcaaattaggaggagattggatatgcattaaagacaagagtgctgccttcaccactcccatgtggatgaggatgttctgtaagacttcttacagtccttcttgctgcgtttttggggatttgggggatttttgtttgtttgtttgtttgtttgtttgtatcctgttctggttttggcttcacagagcagaaactatagttggtaccgaccatggcccagacatccaaataaatagtactggttgtttctcaacacaaatgaacaaacaaacaaggagaatagttcttttcttttggaagtacatactaaaatatttatgaataagaggatatgaagtcagagatttgctttaaaataattatggtgggaacaatggttggaggtttagatgaagcaagattgtcctgggttgacaaatattagaatgggttgatagtaaatgaagatgtattattcaattggatctattttgggatatgtttgaaattttccattaatttttttttttaagaaaaaaagaaattgagtcaaaagaaatggcaaggatcagatcattgcaggtcttatagctggggtagggactttttacttctaagaacaatgggaaattatcaaagagttctgagcagagtaaactcatctgacttacatttgtaaaggttattcattttggattgctgatataacacattatcacaaacgtagtggcataaggcaacataaattcattgtctttctttctggaagccagaagttggaaaccagtttcactgggctaaaatggatgtgtcagtaggcccacattccttcgggaggctccagaggagattctttttccagcttctaaagctgcctgcattcttcggctcagggctcccttccattttcaagcagggaattgcatcacggtgacctctggttctgctgtcgtatcaccttccctgactccgattctcccacctccctctcataaagcccctttgggtccttctcattttggctacctggaaaatccaggataatctctttatctcaagatccttaattttctaacatcagcaaagtccctttcgtcacataaactgacattcacaggttctggacattcggacgtagacatctttggatgccatgatctcgcctgtcacaagggacaagggtgaagctgagggctgtgaggtttcaagcctcagcactatggacattttgatccacacccttttttgctggtggggtggtgggatggggagctgctctatgcattgttaaatgtttggcagcatccctggccttgacccactagatgtcagtagcacctctcccccatgcaagttgtgacaatcaaaaatatctccagacattgccaaatgtgccctggctgacaaccgctggggtagcgaagtaatggcagagaaggccagaagtgattggatcccagttgtattccaaaggcagtactgacaggtgtaagcctctctctctgcccatcgctaaccaccacaagtaacaagagagactacctttgcatatgtgtcgctcacatggacagtatggaaacaaatggcaacacacctttgttgtcagcttctatttaatgttctctccaagcatttcttttgctgctggaggacaaaggcagtagctgttactccttttacccatgaccttcctcggtgattggagcattgtagagggtcgatgagtacctgctggctttggttttataattatagtctcactacacctttgcttggccattgtggaaaaagaacctaatatcctgtgtatcactttctcttctaagtgaaatgtgagacatcgtgttggctaagtggtttggaatcgtcgcacagaaagaattaaccttaatataaagactttgcaacttggtacatgattctctgcagtgtagctgtgttgatacttactagtaataattttatatgcccccttaatcattgctagaatttagcgaacacttactgcttgttgaccactgagctcggtgctttatgttaatatatattatctccatcttcccagcaactttaagaaatagaagctattattaaacccattctacagatgaagaacataagattgagacttatgcaaatcaccgtagcataggcagaggatacatttcagaaatgtctaaattctaaatctttgctcttgaattctttactgtattgccttcattctaggctgcctggggtgccttgatccaacgaagggaagtcaggtttagcattggaagctagcaagacttaactgttttgttgatggctttaggctttgggttttgatgtatgctataacttgtaatacttccagccttggggagggagaggcaggggtgcttttctgtttcaggagagggatcagccactccctctattcactctgcctttctctcttggctaccatggctatgtacaaagccattagcgatgaatcatacgtaggcagatcaagggacacaatatgagctgtttagtcttttccatccttctcgatatgaatcattgtcagattcagagctgtagctctccttatataactttagctgctccctcagatgaatctatgggcacaactcacctttaagctgagaggacaaatgaagttcacaggtgcaaggcagagaactgggtctgagcagactcaaatttttttttttttttttttttgagacggagtctcactctgttgcccaggctggagtgcagtggcacgatctcggctcactgcaacgtctgcctcctaggttcaaacaattctcctgcctcagcttcctgagtagcagggattataggcacccaccaccatacctggctaatttttgtatttttagtagagatggggtttcaccatattggccaggctgatctcaaactcctgaccccaagtgatgtgcccacctccacccaaattttaagttctgttttgagggttcattgatttggcatgggggtctcaaactcataggtctacaggggccaggctggtgtgggaaatgagaaagatggtgataaatgagacatgagaggctaagaagtgggtgggatggcaggcagattctccagcatccacactgcctcccctaggagggcagactcatctccagccaagggtgccaggtggagtgtggtctcatcgccagacataggctttaccaagagaaaccaggaaaataaatttttatgcgaaatctcctgattttttaggtcttggtaattcgtttgttttaaaactgcatgtcccaaaccaaacccacctaaaaactgaaactgggttataaactctgccttgggaacttgatcccaagctctctagacctgcaatgttcaagcggtatgtcccacataccacatggggctactaagcccttcaaatgtgactggtccaaattaaaatatactgtaagtataaaacacactgaacttgaaaggcttagtccaaaaaccgtagtgcacaatatctccttcatttttataatatgatactattatatcataattttataatatactattatatcatattatatgatactatttatatcatcatatgatgatatgatatactatatcatcatatgatgatatgatatactatatcatcatatgatgatatgatactatatcatcatatgatgatatgatactatatcatcatatgatgatatgatactatatcatcatatgatgatatgatactatatcatcatatgatgatatgatactatatcatcatataacatgatgatatgatactatatcatcatataacatgatgatatgatactatatcatcatataacatgatgatatgatactatatcatcatataacatgatgatatgatactatatcatcatataacatgatgatatgatactattatatcataatatgatataatattttggacatactaggttaaataagatatagttatataaatcaatttcacttatttctttctcattctttaatgtgactactgaagcatatgaaattccatgcatagctgacattctacttctattgggcagcgctgcttgaagccttcagtatctgatcacttgcaacaaaaacagagacataataataatcacagacaccatttaccgggttcctaccatgcatcactgtatgaagttttttgtgctttcttttatttcatactcagaataactctttgaagctataatcttactatggtccccattttatagatgtgaacattgagtattagaaagctaagtaacttgtggccgggtgcggtggctcacgcctgtaatcccagcactttgggaggccgaggcgggcggatcatgaggtcaggagttcaagactagcctgaccaacatgctgaaaccctgtctctactaaaaatacaaaaaaagaaaaaaaaaattagccggcgccatgtgtgcacctgtagtcccagctactcaggaggctgaggcaggagaatcacttgaacccgggaggcagaggttgcagtgagcagagatctcgccactgcactccagtctgggcaacagagggagactccatctcaaaaaaaaaaaaaaaacctaagaaacttgctaagagtcacacagttatcacgtgagcgattcaattctggatttgtctacaggttttcagataataaagcccgagcaattaaccactgtgctaagcaagaaaaacacagagaatttggacaaatctgaggagagttggtggctggcttccaacatgcgcctaagcttaaaatagcatgcatttcagcccagaaattatggtatctctccaactttgaacttgtgggcaatgcttcatttaaattcagaagacagaaaatatttccaaacaggtgtactttactctgtgcaaaatgtacatattctttctgcattgagctgaaaccaactatttgtgacttgaaacacatttgatatgcacaaaggaagttccaaatgttaagaaaactatcctgggtctttttaaaactcgtataaaaagatctacatcttccttcttttgtgaatatgcagccgcactgtccattttgcagggttaggcctttacctacaggtttttcctagacatgagatccgagcatatttacctgaacctgatacttgtccacaatttttatggaatagactcatgggtgtgtttgggaattggagggtccctgggaatgaatactcctcctgctccctctcaatgccttcatctgcttctaaaaaatattcagtaacacttgtagaaggcatggtgatcagtgcagtgtgagctttaggttcagataatcctgagcactgatcgtgatgctataacttatgagctgtgagcctggtgaagccatttacattctttaaggcttagttcccttatctgaaaaataaagacatatgggccgggcacggtggctcacacctgtaatcctagcactttgagaggccaaggcgggtggatcacgaggtcaggagtttgagaccagccttaccaaagtggtgaaaccccgtctctactaaaaatacaaaaattagccaggtgtggtggcacgagcctgtaatcccagctactcaggaggctgaggcaggagaatcgtttgaacctgggagtcagaggttgcagtgagccaacattgcaccgctgcactccagcctgacggcagagccagacgccgtctcaaaaaaattaaataaaaaataataataaataaagacacacatagcagtcaccacatatgattgctgtgaggattaaaagaggttagggtctaaatgtgccagcacagtccctggcacaaaacaggcccccgagtacagtagccattattactaaataataaacacgatgatgaggataatgatttttgttcctcagcccttgcttttacttttctgactctaacactcaggactaaacttggtcaaagggttaaaacaaatagagaagggaaaagatttcatctatgagccaccaaggtcatgggtatttggccgaaacacttacctcttcaaggctttgcatctgggtctttcatccccttgcttttttgaacactgtataccctctgtgaatgtaaaaacatttgaagagtatcaagcactccacgggtagtggcagttgcaagaagtctggtccatttttctacctttcacactgtcagagcacgagaccttgggatttttataatccaaattgatactctctaggaaatctcttccactccagctccctgccctggaaagattcattttcttgtgggcatttctccagccctggtgggtaacggtgactgagggtgaattcctaaccttcccttgataaggttcaagtcttgctaatttgaatctctcctattttgctcccatccacctggtgctgtttgatttatctgtgcttgtttgtggattcactgatcactttcttattactcttccacctccatccatttcagtttgcggtgcctttcaggtgatttcttatgccaccccttaccacctgctcaacctgacaaattatcgactcaaactgttgctcctgacctggcgtggtctcttcccagggatataaatgatgcagttcagagggataatgatgccctaataaacatacagttgttcctgtttcagcctgccctgtttgaaattcaagcatgccacaaccactggctgctgccctagtaaaggcagtgagaaggaagagagggaaattggagggctgagggctgagaaatccacgagcaccaataatgagatcagagaaatcacagaggggagttgttgtttttttcaggggtggggggcacttaacatcttattttgctgtagttaaaaatcaggcaggagtgacaggttccctctccaatcaggtgtgttctgaagccctgaagtttggtggcaagaagcagcaataaggccccagaagcaggaggtcagtagagaggagatgccctcagctgcccatcttgcccctaccctggctctcacttgtagggacatggctgcagaggcctatctgaccccagttttgtccacagccacatctttagagatgagcaccctaaatcccacttttataacttagactctgaaaacctttccagatcacagatttggggctgcagctcttcttttttattttatttttttatttattttagagatggggtcttgccctcctgcccaggctggagtgcagtggcactgtcatagcttactgcagccctgggctcctgggctcaagcaatcttcctatcctaacttccctagtataatagttagggctacaggcatgcaccatcgtgcccagatacattgttttactttttttttttttttttttttttgataaatgaggtcttcctatgttgtccaggctggtctcaaactcctggtttcaagcaatccccctgcctctgcctcccaaagtgctgggatgacaggcaggagccaccatgtccagcctcctgtagttctactaattgctattattactcttcactggagaatcaagtcaaaaaatcaataaaacaacatagatgcaaatatctttgaccttgttggcatgacagttctaccaccatttcccctttagctgatggtaaatcgcattcgccctaagaccaatttctttggagaatgtaagcctctagcataagtaataaataaataaatgcaaccttaaatcaagatgaagaccaccctaatgtcttttctcttcacaaacccactggtggcgctagtgagcagggatcacacaggctggctgttcctcaccctggactgttcctccctttggtagatacagaaatggagaagacagggagctcacagctactgttgcctgccctgtgccaggcatcagctcttgtttctcatttaatcctggatcagttctttgtagtaagaggtgtaaccctgatttgtgaatgaggaagctggaaatcaagcactccccaagtattgtaacttgcatcaaaccctccgagagcacatttcccacccacatcctgcttgacttgataatgactcccaacacgtacggatcgcttaccaggtgtgaggcggtctgtgtgtcaaagcagtgcacttggactttctcatttaaggtcgccaacaatcctgtaggttggaattgctgttctcctcattttacagtcgagaaaatgagctcagagcagttaactaactctttgaaggtcatacagctagaaagtggtaaattctagaacctcacccccacgccctgtaaccactgtgcagtgctaccacaaaggtgtgtttgttttatttccttatgccagaaacacagtaggtggtgctgctcagcagacagctctgggcgtctctgggcccccttactgctctgcagctgatcccagagagcctctaggtttccaagtatgcattgcttactctttcctaagagctttgcctctaccaggacacacctttcacttgttccacctacccattttgacttggcataaaatcagcttctttgcatgtgaaaaagacatttccaaaacaaccatgacggctgtatttaaaatgcaaatatgcacattttttttttcggagatggagtctcactctgtcacccaggctagaatgcagtggtgccatcactgcaatctccgtctccaaggttcaagtgattctcctgactcagcctcctgagtagctgggattacaggcatgcgcaaccatgcctggctaatttttgtatttttagtagagatggggtttcaccatgttggtcaggctgtctcgaactcctgacctcaggtaatccacctgcctcagcctcccaaagtgctgggattacaggcatgagccactgtgcgctgccaaaatgcacatataatttaacacccagttctcctcccagtactctactgtgcagtgcagagggactcatgggctggcccattttatcagagctgtttggggcaatgaaatcatgaaaggcatttaaacgcccatcattagaggtctagttaaatgaattaggatatatcaatactatctagccgtaaaaaagatactgacaggtggccctaccctgctgaggttttaagagtgctaatcagagagccctcccattctacttccaaatcaatcaaaaagtgaatgcctgagtcagaatggaatcagctgctttgcttggggagaagctggtttggagccgagctgaactgaaatgggcctcctaacacttccccttgtgcttctgggaaagcttgaagaacagtgcatacgtggaacctgcagatgtgaaaactgaacaatggctttgaacgcatggaccctgttgcacagcaggctctcaccgggatggcacagagaagacgacagattcttccctgttcttccaggagagcagaagtacctacttcctaggcagtggcaaccacttggggaaaggaagaagatggccccctctacaaatgcgtttcaatttggaaacattgccttgatgtagcgttaagtcggaaagaagcaaattaataatgaaacgggagagttcccagatccccgtcgcaggacgtgagacaggggtgtggcttgcctgttgggtcgttgccactgctcaaacccctgaggggtgggggagcacgcagacagacaggtgcaggagcccgagtgggtgtgtgttgcagtgtgccgttttagccctgccatccacggatggctagagcgttaaccagctcaatggaccctctgcctttttgcaagagcagagagccaatgtgacagctttctgtatcccaagcttttgcccagcatccaagggaaaatcgggccacatgtgggcttgaaggatgaatgagggattttatcgagcggtggaggtggctctcagtgggctggatgaggagttgggagggggatggagtggggaaatgatcttcccctggagtttggctgtccagtggctgaactcaactccaaccgtttccacatgaattcctgtcagcattcagacgttccttctctctttctctgccgtgccattccatcgtccatctgcttgtctccttgtctcctcatctgcttttggagcctggggtttggggtttatacgactacaggatgggggatatggaggaccaaaaagcaacactttgggtgtaagaacagaaatgcctgttcccacttaaagcttcaggtcttcaggcttgatgggggggctctttgctcaggaccaccctcttctatccagtatttccctgtctcctgtccatatcaataagacgtatataatctcaattaaaaagtgtgtgcatatccgtgtgtgtgtccacacaaaatctcttaacagagattacttccaggcagcaggatgacaaaggggtttatgagattgggttcctactttaaatatttctgcagtgtttggagtttctaaagaaatattcctttagtaattaaagagagagaaaggaagaaaaaaagagaaaaaacaaatggataattatgttctcagagaatccatctggacataataaaaacagcagcagcagttgtattagtaggtagtatttattgagtgatttgctatgtatgccagactcttctaagcacattacttgaattgagtcatttaatccttgctgtaaccctgtgaggtagggattattattatgctcaatttacatatgaggaaacaggcccagagactttaagtaactttcccaggtcactaaacagtttcccaagatcggcgtttaaaattaaacctccgatgaaagataaaagctctttttgtgtgaaacaaagcaaagcaaaacaagaggtccatagatgcctccactcagggtccctggctccattaagcactgtaggctcaggaaactttcagaaatgttttactttattttagaatcagagggataaaaggaacattcacagtcaaagaaaatgctttacttttgtagggcccatcaaagtgtaataaattttgcctgaaataaaaaaaaaaaagtaaacattgatgcatttaaagtaatatcaagaataatttttaggtatgagccacacagtcgctcctacctgcaatcccaatactcagcaggctcagatgggaggatcgcttgagccaggagatggaggctgcagtgagttacaattatgccgctgcattccggcctgggtgacagagtgagaccctgtgtctaaaacaataataaagaagaacttttaatattgaaaatattttatcatcgtagactcagagggtacctgtgcaggtttgttgcataatgatcaggtttgggctgccagtgtacccgtcaccccagaagtgaacattgtacccaataggtaacttttcaacactcatctccctcccaccctctccctctttggagtccctggtgtctgttattgtcataatattgataatgtttagtattataggaggggtccatgaagacaaaactgctgatggccaccctgtccttacctgcgttacccagcccacttaagtttcaatcatatcgaagtggcataaatgagctcaaaattgttcctaactctcaatcgtgttcagaagggcctgtttgcataaggactgggggcccagacagcactgcttctctaatgaagttgtcatcttggaatccctcacatggagtccctgagtgacccagcacttggagcataggaaatgaaagaacaatgactttgcaataatttaaagtgttacatgagcaatgacaacatacttgcggatatttgagctatttctttagaggaaaaaagaacagtttggagaaacctaactcttgtcatatggtttatttaatgatgatactaatttagagtaggttcccgctaatgaaaagctgtagcaaattatactaacgaatccttgctgtaaaattctttcttgtaattctttacgggaacacagggcagttttcaaatgaagatgtgatggacattcgttcttgagtttttaactgcccccaaaagggaactctgaattactgggacacatcgagggggagggatatcgtttatataataatcaggactgctttcattcagagtacagaaagcccaactcaaattagcatcaagagggacttcattgggtcttctaactgaatagtgtgaggatagatctcaagtgtggctggattcagaagtcaacccactttcctctgtgccggcttcatttacaaaagattctctccgcatggaggtgtggtcccccagattgagaaccagcaggaaaggaagtactgctttctcctggtggttcccaggaaattctgcaagtcttatttttcagaattggctcaggaacccatccctggaccactccttggggccagggggatgacgtgctccaaaaaagctttggggcttgcgtggcatgctcattaggtggttggtgtgggttgacttctcctgaatcctgtggatcaaaagtaaggagggggatccacttcataagacaattgaaaccaaggtgttgtcaatcaagggaaacagcaatggacacaggggaaagaaaggaaaatgtctactgcaatatgtaattaatagtatggagggttaagtttcagtttttgttgatttatggagtttttcaatgtcttacaaacaatcaaaacaccgaaaaacttttaaataaaatttcaaatagctacaaatctagctaccttaggtttaagtcactggagattactggttgaaagtttgttaacagtttcttgttcatgccttgaaaatttcatgcaaaattgtaccttttggctctctctgaagaaacatgacaatttggagtctggattagtccttgaaaaaagctggtccctgaattccttctgctgctgcacctggatgcttcgttacaactagagctaataggaaccacccagcactcgtcaatgcctgaactgggctgactgcatggctgattaaacccacagcaaaaagtgtttaaagtttaattaatcagtcaacaagaaaaattgaactctataccatgggtaaagcgaggctgcacacacacacacgagagacagagagagagaaagagagagagagagaaatttgatggtgaagtatttcctatagaaacaacctctctttctttggtgacaacattatttgggacaccattaagaatttaataaactaattggacttttttttttttttgcaatttcatgccaatgaacactgataaaccaacttcatggttgctcttcacacttgagatttgaatagtacctttataaaacaaagccattatgaaatggccctgtcaccgtgacttctaaagggtaagactgtgcctcctgacaataagtccagcctgactttgtaacatctcttggctcccttgtctggaaggatgattaaaatcaacaactatttcctgagtgcctcttcaatataggacattgtgctaagtacaatatagtagtaggtgctggcggggaggtcacatacacagataaaccataggtgtcggccttacattgcttcaaattcagtgtgaaaacacaaaactcacacgataaagtacagtgtaaagtgacatatggtaagtagcccaaatcaaatgaaattatttaaattgatgtaattaaatatttattgaaatacttacacctacataacaggcttagttcaaggtcttgaggaaataacaatgagcaaaacatacaagatccctgatctcttagagtttatgttacgggggtggcagggggagagggagcggatgatggacgattgaacaaataagtataaaatatgtcagattattaaatgctgtgcaagaaaaatgaagccgagcaagggcttagttggaggtggaggaaagtgcactttcctaagactggtatgggaaggggcttttaagaagacagtgttgcgagggctcacgcctgtaacctcaacactttgggaggctgaggccggcagatcacttgaactggccaatatcgtggccaagacaaacctggccaatattgtgaaaccatgtctctactaataatataaaaaatagccaggcatggtggcacgtgcctttaatctcagctacctgggaggattaggcaagagaattgcttgaacccgggaggtggaggccgaggtgaccagagatcatgccactgcattgcactccaacctgggtgacagagcaagactgtctcaaaatgaaaagaagaagaagacaatgtgagcagagaaaggaatgaagcagaaggaagggagggtgtgtagagtgtccagtgcctgcctgtgcttagtaagcactcaatcaataaacactattattattataattaatctaagaaggagcccgtaaacctgagaggagagtgtcattgcaatgagcttgattgaagcaagatttgtgaaggatgtggcatttaaaaggttgagataagagttcatggggagatgagggaagggccatctgagggaaaaggaaggataaaaaatccaatggacactgagatcgggcacaccagtgggcgggacccataggctaatgtcctcctgcagaaatgcagtttgggtttgtttttgcagggaggttgtttgtttgagttttttttaaagattatctcatcaaaacctgaatttcaggctactgtgagaaaaagtagaaaatctaacagcactgagcccacttttccacgtggcaaacactggtctaagtccttacagccctgccacatcatcccaagatcacaacaccacttcccgggattccagtatattgcggtggtttttaagagcaaaatagcagcattttgagagctgcctgtcatatgaaaagcgttctcaccacacccttccactgtctaaccatgccacagtatcttgtttctcttttggttctcatttcctggtatatgggagaggttgagtggcttttgccagacatttgctttctttccagagctccttcagctatggtctacagtcagagttccatcatggaggcatcctagattttttttttgcctttgggaggggagaagtgaggaagagactatattaaaaatgtaagaaaggctgggcacggtggctcacacatgtaatcccaccactttgagaggccaaggcaggtggatcacctgaggtcgggagttcgagaccagcctgaccaacatggagagaaaccccatctctactaaaaatacaaaattagccgggcatggtggcacatgcctgtaattccagctactcaggaggctgaggcaggagcatagcttgaactcaggaagcggaggttgtggtgagccgaggtcgcgccattgcactccagcctgggcaacaggagcaaaactccgtctcaaaaaaaaaaaaaaaaaatttaaaaaatggtttcatagggatgggaaaagaggggtcccaggcctaattcccagtctttctcctagggttgagctcctgccctttttcccctaaggccaaacacctgtctctgatgtctgattcctcttctcccagaattcttcattttggccaagaccttcttccccagtcaaattcccagagactcatatctggaggacagaaaggcacgaccttagctcttcctcagaatgaggaatagaaaacagtggggggccagctcactttttaataagacactagtatttcagcattctatgaagtcaacacccaaggaatgtccctgtcatctgttctcaccttgcaattgctggtcctgttgtcttccccagccctctccacacctcacttcaccagccaagccattgttggctcctaagcatttcagttcctgatggaggagtaagacaggtagtcaggtaaagctggagtgaggacaaatgggactggggtggcggaatccctggcagaaagtcaaggacgtgaacatacaaggaaaaataggccacagccagagcactgaaggccacaaatgtgaacccctagctaggatatgtcattttatgccaggcaaaatcaggacaacaaagggttctcaagcataggtgcgacccaaccaacccttcaccagccaggaacattttctggtgttaatgccatcttagaaaatgctgtgaaaagctccttgcactgagctagtttctcatcccctgatgtttacacctctcaaaggtgcatggagccccacaatgtgtcactctctgatttgtcacctggagaacacagcgcagacatgtttggctgctttaatatttctctataaatcaatcctctttccccttaatcatgtgggttgttcttctctgaacttgctccaatttgtctacatcttgctgggactgagttgtctaaaagtgaacacacccttcaaatgcgggaactctccctgcagcccctggcagctcctggcgactcacttcaccgcccggagaattccgtgcagggctccagcggtgagcagagttggaaacggcccatccccagtttccaaagaggccgtgtctttctgttcctgagcgggcccgtttgttatttttagtgtctgattgtcaggctgcggcattagaaagtctgtggtcgcattacatattccagaaagtcacattgctggtgatgtgcggctgtatcgatggatgagtaattgctcgctgtcaggcccacccggtgaagctgtgtcctcccaagttgtgaaagggggatagtgcgagagccgcacctgccgcggccccacctgtctgcgcttggccgatgccagcacctgcagcctttcgtaccagcgccctctgctggtcggacgccccacttctgggcgctcagggagcagaaggggcctggcctcacccgacagccccctggctctaggcaagtgagatattattattcccattttaaagaccagataactgagccccaaagaagcgaatatgtggctcacaagcagaaagggataacagatggaagaacaacaataatcagaacagcaacgccagtgaaccgttgcacatcacttaatttgccaggggctgcaaacccacagacaaataatggcagaaagtgcagagagccaggcgcaatataaggagtggatggggaccatggcagatccctggtgctcagtctagaggaggcaaaagcggtaaagctctgccacgcaaccacacagggccagtaacgtcagaacttctcagaaggcatctatccttaagtgtgaaatttctctgattttgaaacaattcatgggccaaacaaaatatggctaagggctacatttgatccactgcccctgcttgtaacccctggtttacacagagttatctgacttactatctcatttaagtttcacataatcctgtgatatcattactggttttatcctcacctttgcaaacaaaaaaactaaggttgaaggaagttatgcaaatctaatttatgttagaaaggagagtcagacctaggctttcacatcccaaagcatagattctcctccctgaacaatacagacaagtattttactttgggagaaaggagactggctagcccaacaccctcctttttaagagtgagaaagccgaggctcctttgaaggagccgcaaatggcaggctgcactttacaaacagtctcaagtctggttctttcaagtcatgatgttgtcctttattctgcactaaatttgttttctaaagactacgcctataggctgagggcctctcacctgtgattagaacatttgctttgagtagctttcaaggaacagagctgtgtgtgtgctgcaccaaccacatggtctcagctggcacctattataattcaaattgagagatgggaaacattgagatgcattaagcaagatcaaactttacaacagttggcacaggggcaaatgaattcggcttgccgacttatttgttcggcccacacaaaccactaaataaatagataatcgtaataataatgtacacagcattgccaaaatttgtcaatcaggtgatttcgcataaaaattcaatttctcatattcttttgcaaaatccaaacatctaccgcattggttctatattcgcagatgacgagattagctggagctatgttgttgccacctctttccagcagggcattcactcagcaactctccccaatacctacctctttctattgtctccctgaggccaaacatcactagccatttatcattgtgtttgggtctttcttttcataaagaaaatgagttgtctcctatagtaatgtctctcaaaagtgagaaaacagactgagaattcgagaaaaataagagagagcatctttctttacagtgatgaagatattctaaaatattcatatttattgaacaatttagtgttactttccttgtctctggtcagcacctgagttttctacaccattttggagactttctaatacagtctagtatctgttagtctagtaatatgaactacctaatacagacttaatcagtgcagtttaatgaatcagctgattcaaaacaagattgggcaaaatgagaaccacagcttgctaagcccccagctgcactgtgggtagccatttccaacaagaaaacagttaggtaaaagaagcttttactgtgtctcccccttggaggccttttctcagtatttccatagaaagccaatttctcatttctccattggcccaagactttcaggtaaacacagagtctattgaaatgctgtgaattcccccataaaagctgatgtcctcatccatccatttctatggcccacccctggctttttaaacacgagaacaatcttaagcagtttagccaacaacaagaaataaaatttgtgaggcttaacatctccaaacaaaaagcaagtggcagtgttgcttttttcttctgcagttataaaagactgaaaatggaatattcatccctgtttctgcatcattttgtattaaatttgtaactactgcatagttagcactataactttctattggtatgattgagataattattgttattcatcttttaattgataaagctttggagatgttatgggctagcaatttgtgactgttacctttatttgaagagactaaaatcccagaagttgaaattatctgttccttgggtcacaaactccctcaaggacttctccagacaggtaatttgtgtgggcaaagtaaccttataaagagctccagcgatcaaagaagttacctatactcagccacagccaattatatacatggaagaatgcattccagtattactagatcctcaaatttttcaagaaaagccaataatctgattggtgacaccttttgatttcccaatgtcaataactaattcctattttgtttttaaatattctgagtcaaactaaatatgtatgtggatccacatttggttcaaatttaccagttagacacctctaatatagtgttgactcctcgattttgcaaaaggaaactggagatctgtcaagggatactcgaaaaacagagacagagagctagcattcacatccacaccattgaacaagctaaggtgaagcctgactgtgagataagacaagaaaaccactttcctctgaaatgaagaacaatgagggctctcagatttttccttaccatgacccttcattctcagtggaaaccccttcttaacctcattatcaaaataacgcatttagctaacttgccatgaaggaacagattttaaactttcatttttcttggaggaaagtctttggggtaattggagcaaaaagctactaagagtcagtgaatatttcagaatgaaaaaatgaagaaggagctaagtcacatacatacacacgttcatacacacacacttgtctaaaggtggggctttaagagtttgagcactgacttgggaagaattagcctcacatctattgaaagctccctgttgatgagaaaattcctctacagggttactgattaagggccagtttttttgtttgtttgtgttttttgtttttctcccatgtcagggttagctcatgggccaacctatttttatggacacaattttattgggacacagctgtgcccctttattgatgcattgtctatggctggtatcacgctaagacagcacagctgagtcgttgtaccagatgccgtatgtaccacaaagcctcaaatgtctactatgtggtccttcacagaaaaagcttgctgactgctcccggatgtgaggggccggtcatgcatcctgtggcaccttgtagggtattttgtgaatgaaggactaagaaaatgataatgggtaccaggaatcaaaaactcaaatgattatagaaagaagaaaaattaaacacagcaggccatgagaaaactgttgtgaactggagtgcttgttctgcatctcaaggtgacagcatctgctaagctcagagattgccatctggcaggaatgtagacccagtattcccaaaccttctgattcatgaatgatatggtttggctgtgtccccacccaatctcatcttgaatttcccataattcccacgtgttgtgggagggacccagtaggagataactgaatcataggggtggtttcccccattctgttctcgtggtagtgaataagtctcatgagatctgacggttttatatggggaaaccccttttgcttggctcttattctcaccttgccagcctccatgtaagacatccctttgctcttcctttgtcttctgccatgattgtgaggccccccccgccatgtagaactgtgagtccattaaacctccttcctttataaattacccagtctcaggtatgtctttatcagcagcatgagaatgagctaatacaatgagcactcatcaatctggattttcatgtgaaatctcaattttttaagtgttggtaactacatttaaaaataaatactgtgggtatctataggggccacctatttttgttatcttctgggtcagcagggaatgtccttatctttcttgtttctgatcaggctacaggaaaatggattgctagagaacagaggttttgtgacggagtggtataagaagaaatctgatggccaagggcttgttactgggtctgtttcaaatgccagcaccttctgtgtctgccttcagacaacaccaaacacctaaatcatcttggtaaacacagatagaaagagacagaaaggttaaaagtatactcataatcacttgctttttttcccctcctaaacgtgtttgagagcaatattgtttcgtaaaaacaaaatgaccccatttctaaagcaatattcatgctaagctactcagctgttaagtataaccagcagtttgcattatgatgaagctaagccagaatttcaattattttctggacacatttaaaattataatactttactgggttagtgttatagttcattcaaattactcacaaactatcatatcaatctcttgcaactgctaatgccttacagatgcgtgaagttaggcgaaataagaaactgaccagggtaatgactttcatactggcattgtattttaagggatacatgtccctaagtatttggatggctaatggtcaaaagctagctcttacttcttataatatttaggctaaaagatataaaaagaggatagagaccattctttttcctatttccaggaaaacatctgggtctgtacaaaaattcccagcagtccactctacccctcctccccacaaattttacctcttctgacaaatgactttagaattctgtctccaagtacccaagggtggcattgctttattttctccctctgggacactgttgccaccaacccttgaaatcttcaacattcttgcctctctacagacactcagctttcagtggtgtacctcaatgcagaccagcagtgagagcaaaattcatcaagtgcaggtccagttaatcgacaaagatttatgaatgtcaccaccagcaggtgcttaaaatgtggatcttcctgaagaaggcgtgccactctaagcctctcctaatcaatgggagcctttcatgcccttcgcaaagtctggaataccatgtgcaaaaatgcgttcaggttaatttatgactgcctctccaaaggttctgtcacttggccctgtgttctgagggacacggtgtcacttaaaaagcaggaaccatgggaacaagctgttttggacttgctctgaatgctaactgctaatgcagtgaagttagccaaatgcccagaatcagcaagggggcttggacagctaatatgaggcttagccacatgcaagcttacagacccaggtgggatccaatcaaataaatacattagaagcctatttaaaacactttttactattcagattgtctttgcattgacaaagaaactacagcaaaacaagaaatgtatcctttttttagtgtcttacccttcatatctagagttgcattgtccagaaaaaaagctacttggcacctgtggccatttatatgtcgatttgaatcaattaaaatgaaagaaaatgaaaaattcctttcttcattcgaacaagccaccttttaagtgttcagtatctacaggaggctggtggctatggacagcttgggtgtctaatatgtctatcatctagaaagttctgttgagaagtgctgacctagagatttttttttttggtcaaaagcatctttgtggctatattatctgtctgcttgtctatcaggttttattaccacctatggcaggatttcccaagtatgatataggcaccactcaagttaattttaacatgaatttttttaacttctaaaacgtatatagttatttcagggtgaattttaaaatatatgacaagaattatgccaagctttttaaaaagccagactcaaaaggttacttgctcaaaaactgacccactccatttatttatttatttgagacggggtcttgctctgtcacccaggctggaatgcagtggcatgatcatggctctctgtagcctagagctcctcggatcaagtgatcctcccacttctgcctcccagatagctgggactacagatatgtgccaccacttcaggctattttttaaaatttctttttgtagagacaggatcttgctatgttgcccaggctggtctcaaactcctgagccgaagtgatcctcctacctcggccttccaaagtgccgggattacagacatgagccactgcgcccagccccactccatttctatcacattcttgtaatgaccaaattatggagatgagaaaaggattgttacctaagggaaagaaagggggaggtagctgtggccataaagagtagtacaaggagtccttgtgatataactcatctgtggcattttggctgtggtggagagctcatgaatctacacatgtgaaaaaaatgttacaggactaaacacacacacacacacacacacacacacacacacccctaagtttaggtaaaactggtgaaacctgagtaggtcagtggatcatatcaacatctacttcttggggtgatattgcactttgattatgcaagatgttatcattgagggaaaacaggggaaggatatggaggatttctgtgtattatttcttatagctgcgtatgaatctacaatgatctcagaagaaaaagttgaaaaatacatatgaaaggtacatcaaacccaaaatgttttgagtataatgtctaggacaaagctaaagaaacaaatgtcattacaatctattattcaaggaaaaacattagccagcaaagaacagtaaaggggatatgcatgtgaaaataatgtatggagatgttacatgagagactgtttgagcaataaagtgtgaaaggctctgacattgtgattaggaaaacaagttggaatgaaacaaagctaggacccaatgacactaactatctgggtggttttgggcaaattactaaacttctctgttcctccattttcccatctacacaatgagaataagaacagaactgttctcatgatgttgttgtgaagctatgatgggagaataactgtgaaatgttagtgcattctccagttcctactaagaacttaagaaatgaggctgggtgcggtgactcatgcctgtaatcccagcactttgggaggctgaggcggatgaatcacctgaggtcaggagttcaagaccaacctggacaacatggtgaaaccccgtctctactaaaaatacaaaaattagctgggtgcggtggtggacacctgtaatcccagctactcaggaggctgaggcaggagaattgcttgaacttgggaggtggaggttgcagtgagaggagatcatgccacagcactccagcctgggtgacagagcaagactccatctcaaaaaaaaaaaaaaaaaaaaagaacttaataaatggttgttatcattgggttatgtgtaccctgtcccacaagaactggagatgattaattattcctgtaattgcttaaatcagagtcatcaaactttttctgtaaaaggcccaagagtaaatatttttgtctttgcaagcagtatggtttctgttgcaactgctccactctgcccttgtagcacaaaagcagccctaagtaaatgaatcagtatggcgatgttccaataagattttattagtgaaaacaggcagtgggtcagatttggcctgtgggccataggtggccaatcccaggcttaaaccatctcctgttattgacttcttaagggaaagagactattgaaggcagacccactcttctttctcttcccactcacctcctcccatacttacagaccattccattaggaagccaaccagaggttaagtcaaaatatgcctgctaattgtgtacttctattgacgagagcccatcatgggtcccctgggtcttgtacatagtaggctttcaataactattgagtgattgattgattgacccattaacggagagagctggattctgacgaaggttaacggagattggaaggccagagcttcccaggtgacttcgccctcagtgctggaagaagggaatgttcgtattgatgcaggcttcgcattgatttaacactgcagggtctgcaaagcattttattaggtatcatgtcatttaatcattcaaatcttcgcaactccgctatggcaactattggtagttttgttttacagccgaagaaactggtactcagaaaaaccaagcagttttcctaaaatcacaccgcttgttcattggcagaactgaggcttcaacccagttatctcaattccaaaagcaagtctctttccatgatgtccggagctctgctaaagaaatttctgacaaatgaaaagtggcctggttgctcctccaatattattacagctctaaattgtaacagggaaagagggaatcggtttaaatatactcaactttaagttatttggaaaataagtgaaaaattctactatggatgtatttatgtataattccacatttatcaaaggtttttgtaatgctataaagttatataataaggaatatatgtgacataaagaataaatatacatgtatatgataaagtatgtatacatagacattatcatgaaaaggatgaaaaccataagtttaaagaagatggctcacagactaaatttaacacacacacacacacacacacacacacacacacacacacatgcacacaaacacaatgctaactcagctactaataaacccagtggccatgggagctttggggacaggcctaggatttgggtctcagccttgccgtattctgtcagtaaccttgggcagtgtcccttcatctgtaaaaaagacacaacaaaaatatttcccctgcacagttgttataaaggtaaaatgaaatattgtatgcaaagcacctcttacctgctctgtgctcagtaaatagcagctgttattgtcatgaagtgtgtgggtcggtgtgtgtatgtgtgtgtgtgtgtgtatgtgtaactctctctcttaattagaatagtctgtggccagtaaccgtgtcaaatccttattctccaaaggacttagcattgtgagtttcacttagaagctctttaatagatgtgtgtgaaaccagggaatgatttggaagttaggataccatattaacaagggtattattattatcctaataaagctcaggtgttcaaatggtgtatttagaacaggatttctaaggctcggccatattaccatttgggataattatttaccgggtaccgtcctgtgttatcagtgtttagtggcctcctcagcctctacccactagatgccagtagcacccccattcctacctcatccagttggagacaaaaatgactccagatattgtgccctgggaggcaaaatccccccgttgagatctagatccagcggtgtctgaaaagtcctccttatgtgaaatttcaataaatagtagggttgttgttcggggaactgaaactccaagggttagaaaagtcaggtgagtttttgtggtcacggaagtatcagtttagaaaatgcaatttgctttcatatgcagaattttttacttcaacaaaggactttagggaagaaaatgctgatctcacaccggcttattgaatagcattttgcaaactccaggcctatttctgtaaaccttccaaaagagaaagccagcctctcggtgtcctgagcctcactagatgataatatatgtatgagatccggagaaacccatgcattcctaggaaatacttcaaagttattttttaacatcaaaacaaacaagggtcagtgggtctcccgtgcagcctctgtctatttataattatattttgtataaacatatttggtgactgtggaaaagacttcatgggcacacaatggcaagcgttcttcaaaactgtctttaattattcatttggctgtgctatattttatgtttcttttcataaatgttaatctttattattgccttagtaagtggggaggaaaacacacacacacacacacacacacacacacacacacagagtaatacctgttattaaatgacctatcagagtgacatggataaatgttgggagtgatttaattgtttcttatctgcagttttatacagtttctatcaaactgaagggtaattttttttagtagctgcttattttaaatgtacaaaacccttgtgtgtaattccattagctgccctacagcattgcaatctacagtttccctgaggctgttgtgaaatattgatgaaatccttgctttcgtggcttgctctgatacactaaacatttgtctgatgttagttgaacttgaatggatctgttcagagctatatcagtactgacttcaaagggagtgaggctgttacagtattttttcctcatttttctttctttcgttcttccttttttctctcctttttcttatttttaacgaactgaagtttcaaagttttaccacggtatactttataaaaacaaagtttatatcaaatgggcccaagtacgtagcaaactgctgatctttataatttcaaatggtgtttttttttttttttttttgattctggtttgttgctggtatcatttaagatattttgatacagaggtggatgctggcccccaaaacacacacacacacacacacacacacacacacacacacactcacagagacagaatgggagaaggatgtgaaacagaaaccctggttttgtgaagttagcctcaggactctgtgcctctggaagtcgaccacataggactctccctttcaacgttgatgaaaaggcaccatgaatgagaaaactcatctccaactgactttttccagctaaagttgtttgaatggaacttcacaactttcaggactagagctcacagttattcctgtgttttctgctcaggttgtgaattataactgctgagagttactaatttgtaaaaagcgatataacagtcttttaggagcttataagcagtaaaatagcttccaaagcagggtttctcaaccttggcgctattgagattcggggtccggtaattctctgttttggggctgtcctgggcattttgggaggcttagcagcacccctggcctctgcccattggatgccagtggcaccacctcccgagttgagacaaccaaaattgtcctctgcccattggatgccagtggcaccacctcccgagttgagacaaccaaaattgtcctctgcccattggatgccagtggcaccacctcccgagttgagacaaccaaaattgtcctctgcccattggatgccagtggcaccacctcccgagttgagacaaccaaaattgtctccagactttgtcacatgtccagttggggggaaaaatgccccccaactcctcctggttgagaatccgtgcccgaaagacacagcttccctccactgtaatagaagggtccctttatgtctcaacaggcgggatgaccttgcaaaattctccagatgagtgtctcacacgatcattcttcagatcagttttctagaatgattttgacccatactcgggagtcaacacactctttgcacctttgctttttagagttctctggaaacaggaatcagaacaggagcattttgtcttcactgaaacctctagaaacgggctgaaggggcttgaccctgagctggatggcattagtttgggaagcatcgattggctatgaaagctcagtaaattgtaatgaatgagccccaaagtgacttccatcaattttttcttccaatagccccaccccctagaggagcagctaacccagtacgtcacctttgccctgggtcagtacgtcacctttgccctgggtcacttagtacaacttttccaacagatcctccagcaatgccaccttgccattggcttcacgctcacagagagcaaaagcagccatgttttatatcaacaattggccctctgtcataactgtttcaaagacaggtgatttactgtatgcctattaaattgtgtgatcgtatttaattaatatcagccttgcctgcaaagttctaatcgtcatgagcctagaacacctatgtctccttgcagtggtgtctctgttgcccatcccagtacacacggtaggggctcagcttttcgaactaaatagttcattaattaagggtttagaagcctcttcaccctcattcccctcagctcccttcctctttgggagcagcactctcttctctgcctttcaacctggcaattgggagagaaaagaaagaagtgtggctgacagaatcgaaagaaaggagggggaaaggagggagagagggaggagggagggagggaggaaggaaggaaggaaaaaaagagggaggaagagaaagaaaagaaaaaaagaagaaatggaaagaaaagagggaggaagaaaggaaggaaaagagagagggaggggaaaaaaagagaaagaagaaggaagagaaagaaaagagaggaaggaagaaagagaaagaagaaggaagagaaagaaaagaaagaggaaggaagacagaaagagaggaagggaaaaaagagaaggaaggaaggaaagaaggaagggagggagggaggggagggggaggaggagagatagactgtagtctttcctgttctgtcctcccacctgttctagtatgaaccctcaaagaatggacattgttcactcatttgcttttttcatatatttatttattgatgatatctctctatactgtgctaaaagtagacacaggcaaatcccacattcaaaacaaccataatagaaataaatgaacagaatagaaagttcagaattatgattggatcatttcccctgaagtagattacataatttattatttgagggatactggctttatttcttctccttttccctctctccttccttctcctttccctcaaataaccattcacatcaacaaagcagccaccaggtggtggctgtgtctatctggcacacagacatcaactggaaggacactccctcttctttgtggcacagagaacacaaatgtcatgccacatgcacagagaagccaagagaatggagtcacggtgccccgttttctgtaagcaagaagggagaaaccaatgttggctaaatcaaaaagagtcaaatcattgccgggcatggtggctcacgcctgtaatcccagcactttgggaggctgaggcaggtggatcatgaggtcaggagtttgagaccagcctggtcaacatagtgaaccctcgtctttactaaaaatacaaaaaattagctgggcgtggtggtggccacttgtaatcccagctactcaggaggctgaggcaggagaatcgcttgaacctgggaagcagaggttgcagtgagccgagatcacaccactgcactccagcccaggtgagactccatctcaaaaaaaaaagaaaaaagaaaaaatattttcaagttcctaaaaacagccctgaagattaaaattaaattagccatagggatgcaaagtaaaagaggtttgaaaagtcctcaacttaatgtctccttcaagtgtggagaggctggactttctgtctgctttgctttcttgagggaaggagggtatttgtcaaagcagcagcaacttcactttgtctccactgtcagtgtatctggagttgaagaagcttattttctgcaaatgccttcagccctagacatgtctgcagtctatttatgtttggctaaaacaagcggaataaacagttgagaggatatcattcatattgtgacgggagacagaatatagggcattcttgacatcctgcatatacaaatcattgaatgtctttctaactagctgcacttgtaaatcaacccatgcgccccttcagaaagaatctactgtaaagtgacttgacttcaactggcaatagatgaattggaatattgaagagctgtttctcttaggttatctacaaagtcaacattagttcattgatgtggccacactgagaaatggccctggaagccactgaacccaagccatgaaaaggatttaaacactgggtggatgtccaggagagttgctggaggggagaagaggtcatcaatgggtagttgtggtctcagcaatgatcttgacactggtccttagtcattcaacatatatacacatatttactgagcatttactacgtgcctggaagtgcctggaagtctttttttttggtctttaagaaatcacccaacccacaaggaaaggagactcacagatagcatctttcctcaacctctacgggaacacacactcacacactatttgttgctcacctgtcgctaagacatgaaaagccttacactctgaaagccctgttgaatgttcctgagtttttaactcatttgcagtgaatccttgagagttggtactacaggccatacaaaacaatatttttttttctagaggagggtcttgctctgttgcccaggctggagtgcagtggcaccatcatagttcattgcagcctcaaactcctgggctcaagccatcctcccaccttagcctcccaaacagctgagactacgggcgcctgctaccacacctggctaatttatttttttatttttttgtagagatgggatcttgtttttttgcctaggctggtctcaaattcctggcctcaagcaatcctcctgcctcatcctcccaaagtgttggtattacaggcatgagccactgcacctggccaaaacaataattattgagcccacactgatactgaacaatgtctctatctctttataaaacaaacagagcattggaattctccatctacagtcttcctcactggatcctcatctaattcacacgtttatttttgcatttaatcatctaattttccttgagcctaccatcttgcaggctctgaggaaacagaaggacccagactgataagactgagctccaaggagtttaccattgggagggagacagaataataattgcaacatggatcacatttctgatcgaggctgattttactcaaacaaaacattcctctattagacatttctgcagaaacttagatgtgttgcaaggaaacccaaatcattaagtaagaacgttacagttgtgttaaatattgaattagccaggtcctcttcataatcataataatcatcatacacaatgctggaaggatggctggagcccaggagttagaggctgcaattagttactatggcaccactgcactccagcctgggcaacagagcgagaccccccctctagaaaaaaagaaaattattattgttctgtatggtctgttgtattgagcactttctctgtgccaagcaccgtgtgaagcacttttacctttttcatccattcaacaattactgtattttatctaagctaagaggccattcagcaagctgcactacttctagtttgcaccactgagaaaaaaaaatgcttataattaagccatgacacactgctctcctgctatcacttagaatttctattttatacttactgaaagactcttttagacttctttttaaaaaagatctttataatgtaacactcttgtgtttatataaaaagaaaaagataagcaaaataaattggttaaggcattcctgaaatagcttccaactgccccctggcagccattttaagataccattgattgtaagattcaccctaattcccaagatgttaaaatgtggaaggaagatcttggaatcaatgaaatgctatttgaaaagtgaatgctatgctgcaggctctgacaaaatgcagaagatactgcaatgcacaaggcacaaagtccctgccctcatggagtgtaaatggcagagtcaagaatttaacaattacacaaataattgtttaattgtaattttgatgggagcaatcgagaaaaatcccatgagactatgtaagaagagatcctgtctaataggggacagaaaagatcttctaagggtgagacctttacgctaaaactgggaagttgagcaggaggcagaaaaagaattaaaagaaagaagagaactgtagcattttctcataaatgtcctcagtggccatacagatttagtattataattatccttgctttacagatgaggaaactgagacttggagagtagaagtaacttgcctaagaacacatagctagcaagtgatagagctgggattttcctcatctcaaacaataaattatctgcttgttcaaatgggcagactcagttcttgctgcattagagacagagggagaaggaggaagaacttggagactctgtagtataaattcagacattattaaatagtttcagtactaacaaaaaaagaagagtatatgtcagactccctatatcctggaaccaaggattccagcctcataggaccagagacatggaagggtgcaataaaataacatgctttggattttcttccaagcaattaaaaactttttaaatgtctggcttaagtaactttaggaagcatattcaatagccctgatgtgtatcacttatagcccaggccctgcatggttgtggacacaacccggctgaaagcatgggcccagtaagtatttttctgattaagaagcatctctgcctttactgcaagtatttctgtatttctacccttaaattgacttctagatatagaaccagatgggttttgagaaaggctatcatactgagcaaatgttggaagtctgggaagcaagactagtccctgggacctatgttttattggaaaatagaaggtaggtgcaaacccacagccaacccagaaaaattctggtgagtgggtaagttttgctctcctttgggagttgaaaatgtcaaagattcatgaaattttcattgagtcattcaacaaatacttttttgagaacttaccaagcaccatgcacaggtgcctccatacagcatcaagccaaagagacaaagataccggttcttacaaagcttacaaactaacaaagaaagatcacaattaacaatagaaataataaagaagtaaattctgtagtaagctacaagttggtaagtatgaaggcaaaagaaaaatagaacagaagaagggaattgggagttctgaaagaatggggagactggttgcaacgttaaatagggtgactggagtaaagtgccatcaggaaatgatatttaggcaaagatttgaaggaagttaggaaaagtgcagagacagcagccagcgcaaaggcctaagatgggaatgttcctggcttatgggaaatagcaaagaggtcagtatggctggagcagaaaatccaggaagagggaaatagaagaaagcgttggagaccaagtggagagctaacatacatagaaatctgagggccatggtgagaacattgactttttctttgagtgggaagaatgtcccttgggaggttttgagcagggaagtgacaggatctgatgtatctttcattctgactgctaggagtgttaagcattgacagtaagccacaaggatgggatcaattcatggaggagtcaaggtggcatgagaggtgcccagttgagaccattgttcactttcagtcccctaggagcgcacctcgtcacttaatgtctcattgcagaaagttgaggtggaagatgcttgggtcttgggtctctgagcttggttttgttgggcggggcgggggggggggaatgggggagggcgtgtttgtttgtttgtttgtttttgagccaaagtctcactctgtcacccaggctggagtacagtgtcatgatcttggctcactgcaacctctgcctcttgggttcaagtgatcctcccacctcagcctcccaagtagctgggattacaggcgtggaccaccatacccagccaatttttttgtatttttagtagagacggggtttcaccatgttggccatgctggtctcaaactcctgacctcatgtgatccacccacctcagcctcccaaagtgctgggattacaggtgcgagccaccacccctggccaggacttgagttcatatcctgcttctgccagtgtgtaccagaaagccactttcatctcttctgctagcccgaaatccctcacataaatgtaaaaatatctacctcacaggattatttccaaaataaaatgtatattgcatactgtaccaggcacacagtaggtacttgaagaaataaaagggaagctctctctttatatatccccaataatgagagagattttatgagatgcaaattctgtcgcctggaagctatttagatttacaatctttattttaagttggtttgcctgagtaattaattcaaagttaagattttattggtgaggtgcccaggattttagcaattgagttagttgaacatgaaaggtctttaagaatgaaagataaaataaagtctgttccattgtagctcatcttcctgtgaagcagattagttcactcctgattggtaaataggttaatgatatgaatataatgagaacgtcacattgatgcacatgtaattttttccaacacgttattgtttagcaccactgagtaacagcagccaaatgcaaagttcaccaacacagctgaatccagcaaagaaagcagtcaattcataaaagtcaatcctcttagctcaggttaaccatgtaaatctgcctcagaagcctgactgtcacctctccctgatttttaaaaatttgacctgcctgtaacttcacaatctcactacctctttaaactcctttctatctaactaccatcacttctttatttacaaaggttaagtcttttatttgctctggcattcctttacttattatgaattgaacaagtgtatctaacccaaccagtaggtttattatgtttgttattgtttgcttactctctggatgctaagttgcttactttctaagtggtctatcctaaccttatttttcccataagtgctataattttaactgcaaagctgtgcaaaatgcaagatttgtctaggaacacacattgcattatagcagaaacacacgtgcctccactatacacattggtaatggcagggcatcatggaaaactgacatgccacaagtaagctagtacacagctgtgagagggcactgggtctggggtctaatgaactcacttcaaagctagattcaatcagtttctgggcatgtgactgtattagttcattctcacgctgctctaaagaactgcctgagactgggttatttataaaggaaagaggtttaattgactcacagttctgcattacttgagaagcctcaggaaacttacaatcatgacggaaggcaaaggagaagcaaacatgtccttcttcacatggcagcaggagagagaagtacagtatgaagtggggaaaagccccttataaaaccatcagatctcatgagaattcactcactattataagaacagcacaggggaactgcccccataatctaatcaattcctcccacaaggtcccacccctaacacgtagggcttacaattcaagatgaggtttgcatggggacacagagccagaccacatcagtgatctcaggaaagttgtttgacttctggaagcctaagattcctcatcttcaaaaatgaaactgataatatcacctccaccatgggagtgttgtgagactgatctaaaacaactcacatgagatccttactaagtgatagctattaggatattgtagatatagaagtcatttggaagcaaacagggttcttatgaagtgctgtagaataggttgtcttcacagcagaataaggtcagatggaggtctcaaaatcaatgcctctaattgacttaaacagaacagttttttgtgtgtgtttggagcccagcttagctctctgaatcacacacaactgagtgatggtagaaaccttcaaaccaaagaaaggagaatattattctctggtctttcactccctacaattgcacaactggttcaagcccagtttatttgtgcaagatgatattgaccatacatatatgccctgctctgtctctctctttctctgtgtgagtgtgtgtgtgtgtgtgtgtgtgcgcgtgcatctgaatttctttcttctacatacgaaaaatatagacaaaaaaagataatgctcccatgactggaaaaagatgagatcatttgtaagtggcttgttaaagtgcacatcattttcctgatcagcggtagcgaggctgcatctttaggagctgatgtgatttatcatgttattatatatttagagacattttgaaaatgctgctatttactcaaccgactgtgtatatggacgatttaaagcagatttttgacccagtagactgtaccagctctatctatcgtctcaatgagcatgtggggactcttaaatatgcagattattgacacaatagactacgagcactgcaaccgtactcgagacgggtacagtcaagtcattgggggatgatatgtttccagaaagcatttttaaggcaaatccacatatatagacttgctctatgaaaaaatatacatctggatagaggggactctggctttggaagggaatatttgctatctagaaatagggtattcttactaacatgcctttgtgttctgcccttttgtctatgaacatctaaataataatacctaccctctacttaatcccaagcaatgtaccaatggtttgagcttagtttactcaaacatgccaagaaaccattccgtttgggttagtataaatgcattctttgattcaaagtatgtattgagcaccatctatcgaacagtggggtctttgattgcaagcgataaatattatctttggcaaacaagtaaaaacaaggaatttgttgggaggaacatagtgtagttcaccaaaaggggaggaactagtatgtctgtgaggaccaagggggcagaatcaaaagacaatctctctatcatagaattgtgaaatggacctactccagcccatttccacctttgagtcataggttcagaattcacattccatggagcaagagtttggttggccaagctggtgttctgtgccatagtaaagcaaaaacaaaacaaaacaccaaaatgggaaagaagagagaaagttgtcatatgttcatttcacctccctgctccttaaacaaatgatcagatatttaaacacacagacataaacacacacaatgcacacacaggatgtctatattgtttttgctggaaaacagtccagatgcactggggtaccatgaaattaaactcccagagggccagaatctctgttctgttgtctcctttccaatgtgtctgtaagggagcagttttatacagcctggaccttatgatgctataagtcagtcccaagtcaatcttatatctaaaaaaaaaaaaaaaaaaaaaaaaagagctacgctacctactttaacatcaagggggaagggagggtgatgggtgatttcaattgttaattcatccaaactgcaaaattagaagtgcagagcactcccgccaagatggccaacagtaggaaatggatggtggttagacgtaaacaggaaagagttccctcaagacctgggcttgccactagggataaagcaatgaaccagacagataagtctctgtatttgttgcatgaaactgtcctgtgcattgtaggatgtttagcagcatcctgggtctctacccactagatgccagtagcaccttgtctcccagttgtgacaatcaaatgtctccagacattaacgaatgtccccaggagcaaaatcaccccagatgagtcattaagggtgtgttggacattaccaagtgtgtctctaatttagtgtcctctcaggaagctgggaccctctgggggtaaacatcatctctgttgtcctatttaagtaggattctggagttctggctatgtgcaagatcttatgtagtcacaggatacaaagcaagcaaggagaaagaagaacatttatagagtctttactgtatgctcaaaaactcctggtgctgggcatataaagataaacactcatagcccccttgttcttaaagagcttaccacctgggaggggaggtcaagaatcacagtttgatttgtccagcagtagagaagaccttggggaggagatgccatttgaagtggccttggaatttgaaatcgcaatggataaataacaatggatttggtgcttaactgcgagcagcaatcccaaattttacagtatcaaccagatcttcatgaaaaattaatggacagaatagcaaaaaattacctcatattttatcaaacaaaaaattataatattttgctatcataattgttagggactgaagaatatatacaccaaggaacgaaacaatgtgtaacatgaaaaatatcagggcacagcaaggctaatttgtacacatttataaaaatgtatctaatttgtaaagtaacggctatacaaaactataaaatgtgcgcatacaaattagatatattatgaagctctcagttgcaaggaactatgttaagcagtaaagggtattatttgttcatgaaatttcaaagtacaaagacaaaatcttcaggtagagtttgatcaaggttgaaattttcttggctccgtgatgtcatatatgttggcttggttctccagccaccattcctcatactagcaaagctcctaaaagtttatgagattatatgttcttatatgaaaataggaaaaacaaatggtaaaaacccttactttcttaaccatcaaatcaaactgagaatgccaatcaccaattggcttagatccagcctgaataacctaaataggatgctacggcaaggtgattaggtttgatgattcagcgcccacacatagacctgggatgggaccaacctcagccacacttattgggaagcaaccatagtgtctcctatgatgtaccctagaacactagtgatctcttcagcattgctcaagaattagcacatttcatttttaaatgcttataagtaactaccaatgtcctctttgaatctccatttttaggtacaactgcaaattccctttgtacctcctaagggtcactcaaaggtgttagaagctgcatataaggagatgcttttccaggaactcagcccatgcctaataatcctcctccaggtcagaaagaaagatctgggttttgtttttggtaatttctccaagaaaagaaaaactatcatttactcccagaagcaaataaaacaataaactcgactgtgcattaaaatagatagatagatgatagatagatagatagatagatagatagatagatagatagatagatagatatggttttttaggggagtttgacttctataagtgtggtctgagaactggctgaaaactaacatcagaataattaaaaagcaagggaaaataacccccaaaaggagaatgaaacagagacaaaaagccagaaagaatatcaagaacaagacaatggctgtcttaggaaccatttattggtgttcaccactggagaatattaaatcaccagatagtgctgtcttccccaactttcctgtcctgggacaacagccaatttggtactattaggaggatgctgataaagtgacctaaagcctcttcctatttacccattttctctataggtagggacaaagaaaagatgacagctcttggaaatatcattcttaaactagccctaacctaagtcgaagggtcaaaaaaccctggagagttttccattagattctccaaactgtccattcaaaaatatcgaagacctatatattgaaaacctatgtatctcccagaattttggtcttttccaagtactgcttcatgtaactatgtgttgtgggtttggcccagctcagactcgctgttccatataatttggctcatttaaaagctaacctagttaattaagaactgaaataggtcaggatttatttggtggagttactggagtagtttagaaatgctaatcccttttatcattaacttttttattcgtttgtttcttgtaatataaaaatactcaatctgataaggggatttaaatgaatccagaatgaattgattgagaataatgttaggagcctgatgaacatttttttcagccaaaacttgaaaaagtatatacaaaaaatcctgagaaatccagctccataacatgattcttcatgactaggtttttgttcttgtgatggtaatgagaggagacatactgagtgctgatttttaccaggcattctgacttctttccagttatctcacttaattttcaaaatgatctttgaggcaggtactattattatctccaattgatagatggagagaccgagccccacacaagttgttagtttgctcaagatgataatgcaggacatggcagagatgagatttgaacccaggtgggcttgctgtagaccttgttctcttccatcctgtaacacctatgagggtggtacacacactttctcctctattaggctgatgcaaaagtaattgctgtttttgccattaaaagtaattacttttacttttgaaccactctcttttaataatagagtgttcttctctgtgcagacccttgcttcattgacaactagaaagagcatgaatgtcacacttacttgtcgtcaattcccaaagctttagctgactttgactttgcagcatttctaagctattgacatattgaggctgtataattctttgagtaaggaccgtcctgtgcattgtaggatgtttagctgcatccctggcctctacctgccagataccagcaacaccgcttctctaggtatagcaaccaaaaatgtcctcaaacgttgtcccatgtcccctggggaacaaaaaccacccccagaactactaagagtattatggtgacccagctgactcctggagtcccattttcttctctagaagaaaccagctgccaaaaataatgatctaattaactcattcaccctgaagtgcaaaggtgagataagagattaggtttttatatttttataggggatgagttcttggtccacctcatgtcagatgaacataagccaagttgtagggtttaaggcaagaagaagcagagagtaagaggtgtcacaattgcgggctcctgagttcacatcacacttgtacctgattcatctacttcccatagggagtaacccaccctgtgagtttaaacccatgtgcacacttcaaccatccaaagcaatattctgtttaaaagataccttgttgttgttctctatggcttgaaagcaaattgggaccagtgagtaaaatctaagttttgaacagaatctaagtgttggatagaaaagcatacttcactgatgcaatcattcattcacttatgggtccaatcattcatttatttattcatatatccaacaaacacttgaacaaggtgggctgggtatagcaatgggatacagtggtaaacaagatagatttgacctgccctctgggagcttacagtcttatctagaggacaatcaagtacatagtaagtacaattgcaaactgaaataaggtatacaaaagaaaaatgggggactgagatagaaaataactttggttgttggtaatttcggaggagtaagtgggggagggtacagtgatcagagatgacccatccgacgaaaggcattggagctgaaactaaaagaattagactaaaaggaaagacttagatatagggaaagggggaatcttttatacatagggaatggaatttcaagggccttaaagaaggaaagaatttgatgaatttagggaacaaggagaagaattttcgctttcaagtcctaaacaaaatgaacagtgatagggtagttctgagatggaaactgggcaggtcattgcactctatgagtcatcactgcatgcatgttcaagtatatgctgagcagtacctgacagaagtgttgatgaagagatgaaagcatatcataaaagcttaaactgaaagttctccccaatcctttgattcgatcaaattgtaccatgatggaaacacggctcaactcctaagtgtgaggaatggaaatggttcccattcagtgtggtcctcatagcaggctagtaacaatgactgtgctggtggagagtccaacatgaagaagagggttggaaagtcaagcatctgagccatttaaggataccaaggccaggaagccctttcctgaatgagaaattggcccaatgacatgaaaattctttccacttcgggcttctgtgattcttctagagacagcaaagacttttcaccagaaaactaaagtccagcctgctttctgatagtgccaatgtagcttttctgagagaacagtgggtttcttgcttgcttgcttgctttttttttttttctttctttctttcttcttaatgggtagtggtcacagccatgaacttagcaaaagaagcaagttaaaatttgtccattcttggctaatgcagttagacatttttgagaaaaggcaatgagaagtggtcattatccattatctgcatgaaatatttcagagaaagaagcagcatttgccaaaaaaaggaaaagatgtttgacttcaagccaggcaaaaaggaaacaagatcaccttctagctctgtgggatggctgtgctaatgatgttatttcaagtaaaattggaatatatatctgaaaaaatacagatggtgcagcagcttcatatactttctgaaggtcattttggacaatgattcactgtccctttacttgggaaaaaaaaaacctctccagtcttggaaggaactatatgtgtgtgagtgtgtttatatatccttatgcggaataaacgtatagaaaataagcatgcatgacttgctgaaaatatttgttaccacttgaaaagtcaacacctaaaaatcttaatttgataggagagtctcagttctattgtgtagtttctttgttcctgtttcgtttcactttgttttctcctctgttcctgatttgtgactctctgggtgtaaggataatgtaaggataatgatttctaaactggagctaccaaaaagcttataaagtggtccccttctcacccttctccatgaatattttctcactctgcttttttaaattgtcaccaagacacgtcgcaataataatatacgctggactgaaattccaggtagctgaatataaagcatttttcttggagaccttctgctttaaacatttgtcacctctctcagtgcaaagcccgaggcctctaacaaagaccttttttctcagatggtgggttgctttatttcttgaggattgcagacattaccattatggctaatgacctaataacttgctatttgatgtttgtacatcactttctacggaagttcccggcacacataccactggctccttgtacaagtgatttaatattaaataacaaaccccaaactggaggaagctcttttcttatgcattcttatggatgacacataaacaaagctggttcttatctattgtgaataccatctaaaagctgttggcttggaataagatttagggataacacagaatgccagactcaactgatttcagccatctgtgggttcaggttgaagatcagatgtacagtggttggaaagtgcctagaaccagcactgagaagttgggaggtaaccctgcattcttggtgtttcacatactttatcacatgctatactctaaagcatcttaagaagcagatactattattattcctattttatagatgaggaagctgtgcctttgaaagttttcagtaattttcccaagattgtcttgtccttcccaagacattacacagtacaccaaggtctgcctgatcctaaggctgaggggccatcttatctaccctgttaactgatcagttcttgaatcagcaatttatttctctcttggttggtgttttccagtataaactgggagcaaccatctaagccataggcatttagtctcttggtctctggagaggacaggggctgaaagtcctcaaagttgtatgatcttttcacaaagctggttcccacatacactggtgaacataggcatagagaagtagattgctaaatatctctctactaattaactgttttgcaatttacatccaaacttctcaaacttcctggcacataggaatcctctagagaccttgttaaatgatttctattctgtaggcttggggtggggctgagagcctgcatttctaacaagctcccaggtgatgccaacaccattcatcaaccctacttgaatagtatgggtttacaatacacttcctcttttgtcctgataggaccctttcagtcagtcaggcttgggatagtcactcctatttgaggttgacagatgaagaaataggtcaaagagctgataggagagagaaccagaaaagcacaccagattctctaacccctggttcctgcggttcagaggttgcaaatggttgggtctcagatgtatttagttttgtccacacagttgggcccaaacaaaatacctggcaatcccaaactccatgaaagtccttcagtagcagctgtgcttttctttctttctttctttctttttttttttttgtttgagacagagtcttgctatcttggacaggctggaatgcagtggcgtgatctcagctctctgcaacctccgcctcccatgttcaagtgattctcctgcctctcagcctcccaagtagctgagattacaggcatgcaccaccacacccagctaattttttgtatttttagtagagatgggttttcaccatgttggccaggctggtctcaaactcctgacctcatgtgatctgcccacttctgcctcccaaagtgctgggattacaggcgtgagccactgcacctggtgcactgtgcttttgatgtgccataaactttcctcttactcacagccctcggtgtcctccagacaagtgtccagtctagctgagtatacatgattacttaccttcacaactgagaacggattttcctccacctggcccgcttcgcccattttcattacctgccttccatcagtaatgtgtgaccttttcatgacctctctctccaaaacctcagcatccaacttctctccataactcacctctctacttgccttggccttggaagacccactgtgacgaaagtcctagtgaaactccactaaagtgtcttgcatgtggtaactgcagaataaatatttcttgattaaatgaataaacagatgaaccacaaagggatgacagaatatccacttctcctgacttaaactagcttagccgtttttttgctgatgaccaagatgtggagaaattcacaaaatgtgattagaaaacgttttacagtccaaagagctgtaacgatggcccaggaaagaagcaacaagcgtacattaagtgtttagacggaccccacctggtatgcaagcgcggtacatgtaaagcattccaattacccgaaccatcttcaggaaattgaaaaaaatagagagagattgttgttttgatgaccaccagaaacctccccatttatctccgcagagtactcatgggctcaggatggccccccatcactgtacccacgccatctccagcagtgctttaaacaaagaattctatttgtttggttctgactttcagacagaggagggagcaaactcttctctctcgatccgtatatatcagtaacacttatgttatatgtggcatgacagggataaaaatccacgcaccataaatgtcacatttctttttgaacatttttctgtttaaaaatgtgcatgaacgtagatcacttctccagccagcaaacacactgggccctggcctgtggtacctggattctctgtaaatgaagtctgtgctcaggaatggtgcaaggatcccacagctctctagacttcctctctcctgaaacaaaaagcagagggatccctccacatggccctccaagaggccctcactccaggcctggctacccttgagaatagctcagcttccttgaacactgaatcctatatctctttactcagcctgccaacatgcatgccaattagtgccaataataacatacatactaacagacttttagaccacagtcacccaaacactagagactcatgacagggagctctcattccgagtcatcattttttgtacctactgggtacacgctgagaaattctcacgatctcctcatttacgtctgccttgaaccctgtggcatcttcctgtgactttaaacagtcatttagtgcggtagattggcgaaaacgatcctgtcaccatcggatatgtttttaaatgaggtcttggttgaattctggtttagtttttaaaaatcagccttcttgagttttaaattgttcttatgttatgattccacttctgctgccatttttaaaactgtcagtgtttttactgtaaacactattgtggactttcaaggtgactacagaaacgtatacctagcaaaagtctgatatgtaactccataccacccatgaattattttgcacaatttcatttaaatcattctgactagaggtttggaaaaaattgaggtggtatagttttaaaaataattgttttcctccttctgttgttgtttttttgggacagggtcttgctgtgtcacccagactgcagggcagtggcgtgatcacagctcactgcagcctcaaccttctgggctcaagtgatcctcccaccacagccacccaagtagctgggaccataggcatgcaccattatgcctggctattttttttttattttttttgtagaaacggtctagctatgtggcacaggctggtctccaactcctgggctcaagtaatcctcatgcctcagtttcccacaagtactgagattacaggtgtgagccaccatgcccagccattaacttttcatatgaaagaaaatttctctaagaagaaaataaaatataagggtttatttctaatttttacccacatactattagggtaaaacaaatgcagcatataaaatattcttctccaataatatttctccttttttaaatgaagaattcaggggaaggctactctaatatgtatgtctgctaatacatatgtaatgttgtttatagtagaccagctaatggactttatccatgataaaattagtccatactttcaaagttcccatgtgtgaatctttgttgaatcaaagtctgttcacattaagagcatagattctgatgctttgaggtcttgttgcttatttgcagcctttatacttaggagtgtaaatccacagctcaaagaagttgggcagcaaggaagttggtagctgggttgttctgaaaagatgatttatggggatgctctggtattatttcatttcatttcatttcattttagacagagttgcactctgtcgcccaggctggagtgcagtggcagaatctcagctcattacaacctccatctcccacttcaagtggttctcctgcctcagcctcccgagtagctgggattacaagcgtgtgccaccacacctggctgattttctttttttttttagtcgaaactgggtttcaccatgttggccaggctggtcttgaactcctgacctcgggtgatctgcctgcctcagcctcccaaaatgctggaattacaagtgtgagcctcggcacacagccgatactctggttttatcattgagtgaagttgattagcatgattgtaattcacatctatctacatgggctgagggtgggcagatctttacccaccagaagtaccaatttcactgctgaggaatggagccaaagtttgcagctggaataatcctttttactgtgtaatctattcattcattaactcaaatagtttgtggacatcactctgtgccaggatgtgaactgagcactggggaggagcattctgactgcatggggatagatattctaaccttacatccagtagaagaagacatcaatcaataaacaaatgggtttatttcagagtctggtaagtgctccagggatttcaggcagtagggtgatgtgatggatagttacacagagcaggggagacatcagcaaaggcctcactgagaagggcccattggagctgagacttgatggaacctgctatgtgatggtgcagacaaagaacttttcggtcagaaaaatctgcaaaggcagaaagcctcagtcaggagaaggattggcggggtcaaggaggggcaagtagattattgtttcctaggcatgaagagaaggccgtgggtgatgagagaggggcagggaggttggcctagggcacatcctgcaggctcttgtagaccatgctaagggttgagattttattgcaagtgcaacagaaagacactgcaggagttaaaagagagggctgtcatgacctaatcccttttacaaagaatcttctagcagttcactgaagagcagactgtgggaagtagaagcaggaagctcattgtccaacctaggggacaaaacggtggcccaggctagagcagtggccatggagtgggagaaaaatggtctcttgagtcagtagttcagtcaaagaatggaccggatttgctcgtgaatcagctgttccaggaatggggacatctcatgtggccagagtcaagctggggaaatggatgaaactggaaattgaggttggaaaaggaaatttttgccactatgaagtttgatcttcgacccccaatcaacaaggaagttctatagagaacagttcttttgtcctgtgctttggcataactgtgatagttttctttcattaaataagtattcataagagtaaacttgccactcatccacttatcctaagacttacacaagatgcaatcttattaaacaagtcatcaatacagagagagacactgatactcattattcactcagatcacccctgttctggctgcctttcctctcttgccccaactgctggtggcaaacaaaatcacttaagtcaagtgaacagttttagatgtataatattgaaaggtgtttttttaaaaaaaactccttggaaccctcagccattgttaaaatacactcactttgacagatgtttggcactttttgtatgaggcttttcaatgccttaccttatccagtgcatgagatttagtcggctctgcagaggaaaacagacaaaaagggtctctcagcacgagttactcttctgtaaaggttatagtaaacatgtcaatgcctaattaagcagaaaattttatctgtattgtgggggaggcgtttgctgtctctgacttttcttctggggaatccatttagaaggacaaagtagattgtgaggttgagctggtccggaaagctctgcttccaaatgtcagtgggaaaaaaaaaaaaaaaagaacacttcttttctcctagtttgaaaatgactatactgggtgggcagattgtgtgtgtgtgtgtgtgtgtgtgtgtgtatgcacaggtgcacgcattagagtgcatgtatgtatatttcatcaatgtacacacaaaataacatgaattacttcccaacttcttgctagatgtcaggcacggtgctaggcactgaaaatactgagatgaatgaaacccagaaatgcccttagccaattgtgatgacagaaagtcctcatggccaccaaatccccagatttctttacttgcttctttgttgctgtgattacgttacccacaggtgttgtcacatgtcttagttggcctggaacatcctgctgactacctgttgacccagcgtatgttccagagtaatagcaccccttcattctccaagtgaccctatttgattgatgaaatttgtctgattctctgatgtatgttacttggctcagtaacaacttattttatcatttgttatttagtttattaattttataacagagactttctctttgaatggtatatctattttttgcaaacatacaagttaatccaggaaaaaggaaatgggatgataccgacaggaataatctaattcggccatatggtcattttaaactacagttttcctgcaagttgtgaccgcttattaatggttttttgactagattgagtagttgttgtttttttcaaaccaatctttgaagctagagaccagtaacgccaatttaataaaaaatccacctgtcaatttgctaggaaggtaaaacacaccacaccaatagcagtaaaataactaacacaaccataaaactcatggctagactgaatttatacatttcatcttgttttacggtattctgtcactaaaatcatgggctcttgtctccagttttcccacagttttcccctgtgatgtggttatctatttagtgacatttcaatgaaattccactgcttaacctttagcctttgggtctcatcaaagggttcttcttcattaggttggcaatacaaagatagcagcatctcctgtattcgggcattctcccatcaggcagacttgggtgtctgtcctcactctgcaacgctagctgtgtggccttgggtgaatttccttaccttaaagcctcagtttccccctctgtgaaatgaaagtaatagtggctacttcatgcagatattagacaaaatgaaagaatgcatttgcagtgtttagcttacttcctaggagacagcaattgctcaataaatattctttatcttcagcagcagcagcagcggcagcctttggagttgctgattgtagctgctttatcctagcaaatccccttctcttctaattctccgtgcctgcctcacaggatggacctccagcgcatgaccactccttttccaagctttgtccttagtgactggaaataacagagcctgctctaaggttttccccacgtcgctacctgccacagagagaggagacagaagttcataaagaaaatattgcattaagattgtgcaggccttgcaaacctaaaactggatctccttttctttgggacttctttggttgcatgttatctgcatggttctgaaaaggccaggtgaagaaaatgagcccataggcataatgtcacattccccatctccattgatggatatttgcccattaattccctttgcactggctcactcatgtcttcattttccctatgtaattactggtcctaaatcctttcagagaagggaaagcatgcatccccaatagcattttgcatctacaaatcaaatatataattggcatctcatgacgggtacccacaaatcacagtgcatttgaaattacaggcacaagatcgagagggcattttcaaccttgtctggaaaggtcttcacaaacctgttttagaataataagatagtcgccaaatctcccattctagcaccatttgcgattattttcaagtcattatatttgctgagcttatataatttttcaactatcaacagaagattttatttgcataccccatcatctctcttcctgctgtgtgattccctacaaataaaaatgttatagcaaaaagacaggggctatcaaaaaatataatggctgtgtatccaaattacttctgagcactcaaaaatgatttatttatatggttatatgccaatatatccaagtgtcttggtaaactttaccatctagatgccaagagtcaagtcttagtctccctatgagccaacattcttccctgtagacacgtgactttaatgggatatgaatttcaatccagatttcctaaaagtcatacacatgaatttagcaactatcccatcacaggaatattagaaagatattccttaaacctgaaaattattaacttgggatcctaggcatttataaagaattatgactcctgccaattgaaaaaaaaaaaaaaaaaaacactagatggcacgaaagacaccatttggcttttcctgtgtccactgctcacagtgcataaaaatgtagattaaatcaccgttcagttcggcatgggaagcacttagtctatgtgaggaaattggaatggaatatggagcctgttactgtcgtttcatctcttcttcttctcttgcaggctacgcccaggaggaacagctgaaagaagaggaggaaataaaagaagaggaggaggaggaggacagcggttcagtagctcaactgcagggtggcaatgacacagggacggacgaggagctagaaacgggcccagagcaaaaaggctgcttcagctaccagaactctccaggaagtcatttgtccaatcaggatgccgagaacgagtctctgctgagtgacgccagtgatcaggtgtcggacatcaagagtgtctgcggcagagatgcctcagacaagaaagcacacactcacgtcaggcttccaaacgaagcacacaattgcatggataaaatgaccgctgtctacgccaacatcctgtcggattcctactggtcaggcctgggccttggcttcaagctgtccaatagtgagaggaggaactgtgacacccgaaacggcagcaacaagagtgattttgattggcaccaagacgctctgtccaaaagcctgcagcagaacttgccttctcggtccgtctcgaaacccagcctgttcagctcggtgcagttgtaccgacagagcagcaagatgtgcgggactgtgttcacaggggccagcagattccgatgccgacagtgcagcgcggcctatgacaccctagtcgagctgactgtgcacatgaatgaaacgggccactatcaagatgacaaccgcaaaaaggacaagctcagacccacgagctattcaaagcccaggaaaagggctttccaggatatggacaaagaggatgctcaaaaggttctgaaatgtatgttttgtggcgactcctttgattccctccaagatttgagcgtccacatgattaaaacaaaacattaccaaaaagtgcctttgaaggagccagtcccaaccatttcctcgaaaatggtcaccccggctaagaaacgcgtttttgatgtcaatcggccgtgttcccccgattcaaccacaggatcttttgcagattctttttcttctcagaagaacgccaacttgcagttgtcctccaacaaccgctatggctaccaaaatggagccagctacacctggcagtttgaggcctgcaagtcccagatcttaaagtgcatggagtgtgggagctcccatgacaccttgcagcagctcaccacccacatgatggtcacaggtcactttctcaaggtcaccagctctgcctccaagaaagggaagcagctggtattagacccgttagcagtggagaaaatgcagtcgttgtctgaggccccaaacagtgattctctggctcccaagccatccagtaactcagcatcagattgtacagcctctacaactgagttaaagaaagagagtaaaaaagaaaggccagaggaaaccagcaaggatgagaaagtcgtgaaaagcgaggactatgaagatcctctacaaaaacctttagaccctacaatcaaatatcaatacctaagggaggaagacttggaagatggctcaaagggtggaggggacattttgaaatctttggaaaatactgtcaccacagccatcaacaaagcccaaaacggggcccccagctggagtgcctaccccagcatccacgcagcctaccagctgtctgagggcaccaagccgcctttgcctatgggatcccaggtactgcagatccggcctaatctcaccaacaagctgaggcccattgcaccaaagtggaaagtgatgccactggtttctatgcccacacacctggccccttacactcaagtcaagaaagagtcagaagacaaagatgaagcggtgaaggagtgtgggaaagaaagtccccacgaagaggcctcatctttcagccacagtgagggcgattctttccgcaaaagtgaaacacctccagaagccaaaaagaccgagctgggtcccctgaaggaggaggagaagctgatgaaagagggcagcgagaaggagaaaccccagcccctggagcccacatctgctctgagcaatgggtgcgccctcgccaaccacgccccggccctgccatgcatcaacccactcagcgccctgcagtccgtcctgaacaatcacttgggcaaagccacggagcccttgcgctcaccttcctgctccagcccaagttcaagcacaatttccatgttccacaagtcgaatctcaatgtcatggacaagccggtcttgagtcctgcctccacaaggtcagccagcgtgtccaggcgctacctgtttgagaacagcgatcagcccattgacctgaccaagtccaaaagcaagaaagccgagtcctcgcaagcacaatcttgtatgtccccacctcagaagcacgctctgtctgacatcgccgacatggtcaaagtcctccccaaagccaccaccccaaagccagcctcctcctccagggtcccccccatgaagctggaaatggatgtcaggcgctttgaggatgtctccagtgaagtctcaactttgcataaaagaaaaggccggcagtccaactggaatcctcagcatcttctgattctacaagcccagtttgcctcgagcctcttccagacatcagagggcaaatacctgctgtctgatctgggcccacaagagcgtatgcaaatctctaagtttacgggactctcaatgaccactatcagtcactggctggccaacgtcaagtaccagcttaggaaaacgggcgggacaaaatttctgaaaaacatggacaaaggccaccccatcttttattgcagtgactgtgcctcccagttcagaaccccttctacctacatcagtcacttagaatctcacctgggtttccaaatgaaggacatgacccgcttgtcagtggaccagcaaagcaaggtggagcaagagatctcccgggtatcgtcggctcagaggtctccagaaacaatagctgccgaagaggacacagactctaaattcaagtgtaagttgtgctgtcggacatttgtgagcaaacatgcggtaaaactccacctaagcaaaacgcacagcaagtcacccgaacaccattcacagtttgtaacagacgtggatgaagaatagctctgcaggtatgggtttgctctgaggcattgcgattagcctggtgaggagctttcttacagggagatgggtctgcttagaggcagctagcatctcccaatgccaagcaggatagtagcttgctggagtaggatttattttaatgaaagaccagaacatgaaaactaagtcctaatcattctcttaagtcctctagtttagagctgggaactagaataaaacgggtttagagagataaagttcacagattactactgctttttttaggccttcatcatccataatcctgaattacccaaggcaagctccagtgtccagccaaggctatctttcattttaattattagatactaacttctgtcaccattccatttcaccaccccacctttccatagcaatgccaatgacttataaagtgacaaaaagttgagcaatggaagaaagattggagagtgctagaagtagttactatatagagattccttaatcagctcatgaatagcttaaagttgtctttatgattgttacttgtaatgaatgcttttttgcagcttacttttagtaattgccaccttccacctcttccctttggttattttctacattaagtgtcctatgaatgagcatgtgcccttaacaggttggtagaaaaatattcttctttgcagaacattgagatgaaaagaagcttattttcttctttcatcttttggttttcttgtggatagaccagtattagagcccacctttaacaaagatagaggcaatgtgtgcccttgaggtttcatttcacataaagaaacaaatggctttctgtacacttatgttaatgtgcatggagtcccatagcttgaagataatgtgcatcatgtgtcatagaagttccatgccttatatagtcaaccatgcccagaccatttgtgtcatttttaggaaacagggcagagaccaaggtcaaatgctttggcagattagtttcaccagccattttcaaatgttgaggataagcaaggctgggtcttaaccaatctctttcatttgcccatttgtgttttctctacttctttttctctcccttccagcatgatgcccgcatacactaagggccctcctatgtgttcaggtggtcctccaccttcggccattccccaagatgggaacccaacctgaactaaaccttctgtgctgaccaatccagttgacgtcatgttaagttacggatttgctcctagttaattagctcttaattcacgatcgaatatgaaaaactaataacatataatcgctcaccacaccctattgtcagagcattggtttacaaatagaagactttcagaacaagctagaaaggtaggacactaggagagttccaggtagagagcggtatttacatggcatggctttgggcttgcctcacatcagacagaggggtttactgggtgtgaagatggccaagatgaaataaaaagttaaaatatctgacctgggactttcccctgagtgaggcgatctacgcttctgatggagaggagtcctcctataactctaattgctatctagacccaaatgaagactatctttttggtttgcatgtttttatcatgatgattgaatgtgttattggcagattcttctcattctttccaagcatgatttgttcagctcacggaattgaaagaaaagccaaaatgcatccattgaattcacacctgagcttggggttcaacagcgtcctatttatttgctgcataacattttaaatcttaaataacttgccattatgttttcctggttcttaaaaaaaaagagggggggcatacagagaatacttagagagaagaaagatatttcaaatccaatagtggtgggttgaaaccatggtgaagaggacaaataggtaatatttatttgtactataacaaagaccacttttccacctgttaggtttgtaatcttttttagaaaattaatataattgccaaaacactctgatatgtagatagggagaggtaaggaaaagaaagcttgatccatcgtcagtcagaatctggagtgtatgatacctgttctagggattcaaaggtgaaccaataatttggaaaaacatatacaaaaggtacttccaaatccattaaatacatagataagatagccattttggcacttctctgcatttgtacaggatgagtatatctaatttggacctcgaaagcaccgtattggtgttttcattatacaaaaccaaagctccatccttacaagcaccattaggctgtggttctgagaggattgcagaaaaacaggtttgagtgtttgggactcactcaaagccatgggcgtgtatgtatgttttgtaaacagaaaagatggtgcaggtactggctgtgtttgtgttcatcgtaaaaatactcctatctgcctgaatgtttcccccatctgtacaaaggtcgattcttggtgctttggtcaccttagaaaaaaatgcctccacccccggggtcctcttttagaacaatatttatgcaataccttgcccattgcttagaatgatgcatgtaaggtttctaaatggtcatgaaatgacatcactgttgtctggaactctaatcttagttgtaatgcatagtagcacaaattgtgcaaagtgacatgatattttagaaagtatgatcaagatttcttggaaactatgagagctttaacctatcaatgttttttgaaagacacaacttttgatctgaattttctttcctttaccagatatatcttaaatcctgcaaaatgctctgccaaatattaaatgcaacttttcgttaaaaatttcattagaaaatattaagtgtgcatctctattttaggtcataagtaatctaaaacaatttcaatatgtatttgtatatagctttaaaagccacatgctcttgactaatagaaattaaacagagagcaaatcaatgagtctgaaatgcataaaggcttgaaattatagtcatcactgtgtaatatagtgtacaagcttaacagcacacctagccttgaaattgttggcaggaaagtattctagtccaatgagctgccacttctgttgtgggcggcttgataaaaacacatattcagggtgaaaagcgcgtaaggttgccagacaaaatacagaacggatgtccagttaaatgtgtatttcagataaatgacaaataggttttgagtataagcctggcccaaatattgcatgggccatacttatatttttaaaatattcattgtttatcagaattcaaatttaactgggcatcctgtatttttattagctaaatctggcaaccctaacagcatagattatatggcagttgggaagaacaaaatagcctggacaaattaatatctattaatggcatcaaccattccttcctccattaaataaatattccttcctttcatcctcttttccctcctttgttccttcattccttcctctttcccttctttccttccttccttttttcttctttccttccttcttttcttccctccctgcattcctttcatccttcaacaaatactggttgtgcttttactatgcaccggactctattatatttaacaatggaagtataatactgaaccagaagttctaccaattgtaatagcaaaacatgccaagccttgcagcaagcactttgcaaacattattttgctttattctcacaaacagccgtatgaagtagaggttgattcactcatgatagggaagagaaaatggaggcagagagattctgcctgaattccccaaggtcctacaatctctgagcctcactcattcattatgacatatctagaaagccatcgttccacagcaagcactgtgctaattcccagggagtaagccataaccaggacaagagtctgcctttgaggctagtggcagacaaatagatgaaaaactctaggggaaatgctgaaaggagcacacaggaggtggctctgcctggttctgggggaagccgggatggggaacagtggtctcagaggcagtgtttggaaaagaatgctggatttaacccccaactcacttgctttcatgaagacatgccccacttctacatctttatgatgtggacataatatccttctcataggaaggttgtaagaattaaatgtatgtaattattttccttaaagcccatagtaggtttacaagaaagcacatagtaggtctataagaaaagcaagttctaggtagagccactacatgctcttaccatgctctgtagcctcacctgcagcgtagagaacttgcagcaacttctcaactctaactaattaataatcctgcaaaatctcaacctgctgtttgattcagataacaatgacagtgaaactaccgttgactggcctctttttataactcaggcataattattcatattatcctcattttgcagagaggtaaaccaaagctcaaagagtttcatgatttgtccaagaagacaaaactaaacctggaggtaggttttgaacccaggactgtccaatgctcatcaactttctcctgctccttggtttcctcctccttgcctgatggtttctaggtaatactcatggctggatgtacctccaacagcccagagagaaagctgtaaaatgtggcctaagagctgagaggagaaaggacactttcctgggccttttggaggctccagctatcaaacattgcaactcaggggcccaggactgacccgcagggtgaagcagaacatccttgttctctttcttttaatgctcttgttcaatcaggcaattatacatttgccatatggtgtctaaccaagaaatgacccaaattccagtgaaaatacatacacctaatattaaaaaagaacatcctcattctgaccctcaggaattcattttagggaaaggaaatgagaactgaggaaacagggtcaagtacaataatctagcatctctcaagcagcaagaaacaaatgcatcgtcttccttaacgtttgcattttttcaaaaatatttggcttaactccgtctatgcatctcagcctccattgcaccttcccccctcatttggacttttgaatgctcaatcctgacgtgtataatttggtgctttaatatagagtaacattatttttcatttactccaatctgccatcagtatcatcttttcatttaaccagatgcaattcttttttctttcgctaaattgaaaatccatgagcgacagggagtgcaatgttttaattagctcatattttttatatggatttatgtctttaaaatacatttgtgtaattcttcagctaaattaaaaacgtctttgcgaaagtgaggaggggaaaataaagagctaaattgtgtcattagcttaggtggttgcagatgaggagcagaatctggtggagggacacacaatcgccagagctgctctctgtgaggatcttgaacttgcccttcctgcagagaagtctttctccataaagatctctcaaaaatggcttggggaggatttttttttaaggcctctagtaagtaaacaagcagttaccttcactgagctaatttgaaacccaacctgccaccaaacaaacagagaaaaagaagtcataatgataaacagttttccttgcatttctctttgtctttttctttttttaactatcaagtttaaagctttccacgatgcttttttctactttctaggagacaagtgacattctgtggtaaatgggagaaaaagccatgcagaactgaaatctctctaacgcattgacactaacttgccctctattgttggaaatgagcaggcgttcatgattgttcatcaaacggctcctaatgcagttaaagcattcagctataatttctccttgcatttataattactgtcatagactgcacacctcggtgagcagattaaagctataaactatttagcctcggctctaagacgaggaacttgatttgtctggcaggagttatttgttagggagcttgacacttcacataaaaatgactcaacttgatgaagaacaatgcagttttagcaatgtggggattttaaatcagtcatgatgccacgccctgcaagaatcgcagggcagtttgttaaatgatatgtaggccagggagataagggaatgtgttaagggtaccaaaatagaagaggatttggtgtgcagttgctttctttcccgactctctcctggaagatcaggagtttgttgaaaatcagtgcatgtcatgttctcctattaaatccagtgtaaatgttatgtgaggctcacctggagggaaaagggatgccagcagccacaggcacatgtcacatttgggggttttacagaactctgtgtagctgttgagaacattcgcctccagaagcgaagttctggagtatatggaaaagccaggagtatatggaaaatagttgtttggtttggtttgtttcctggaacatgttcatgtatttctttgtgtatttgtttgtttacttgcaggaggcatagaatatatttaggcacagaaggtgtttccatggggctgattctataccttttatctgtgaaaataaacaaaaaatagatactttccaactcagacatcttctgattgttgagacacagtgatcaagagctttttctcaatgaattttgggcaagtttgacttgccatggaatcatctcccacctacccacacttcatagccataaatagacacaaatttcccttaaaactggcattcagcatcaagactgttgaatgtttatttgccgcaaacagtggataccggtgcccaaatattagggatcatgaatacaagtgctcccaggactgggcgatgacctggaggaccctagcatgccggcaggggccgtcacggggaagctaggaggccttgcacagcaccagtggtttccaaagaagtagcaaatccagatctttgtgtgagccccccagtgttctagtcgagagggtttttttaatggatgtgttttggtttagttcggattttagtttgttttgttgtttttgttctgaacacccttcaagccaaacaaagtacatcaaagaccagattcaactcctaggctgctagctcgcagcccctggatctggtggcaggtcaggtggagacactggacctgtttcttggtgttctttgtcccctctcccccaaggtaaccccactaggactttgggctctaacatgagtgccacttttccgcatctcagaggatactgggctgttctttaggaaactctacttccttctgaagatttcgtcaagttgctgctactcagaggaggggggcaggctgggctcccctggagaggagccaatcattcaggcttacccaggacttggccgggagggttccagggatttgagaatgaaaccagaaaattccaggcaaatcaggtgagttggtcaccctgctctcctgatatactctggtttcttttcagattatataaatcttttgccttctactaatacatctcttgccttagggcacaatactcattgccggcgtagcttgtgaaatggtgtgtgttctctaatccttatgatatttagtcaatgctgttacccagcacatttgacctatggtatttgtctaatcctcacagcaaaactgcaaagtaaatattatacccattttagagatgagaaagctgaggctcagagaaggcatttcaggtgcaggtagcaggtagcaggtagcacacagcagtagcacagcagcaggtagtggagctgagactccaggccacagccatcagaatcggagcacagggctccttatgcagcactgggccaccagtgctcaacttcagtgtatatggaacagacaatgtttcaaagcatggtgcctttaaagtgcatagtcttaatgagctgatttttgaacatgtgtaacggtgccttggctgtatttgctacaaagagtggaatcttcttgcatgccaaaaaccccagcccaaaggatgcatgtccagaatgagcaagtgtttctaaagttttaccaactttagcccaaatatatgccttgcaagctacccagcactcatgccagtaggcaaaggactatggctaaaggagattttgttcaatgaagttagccttcaagttattgttccgtgatatgtgttgatttttttttatacaaagcttctccctttattcacttgggtgctctacagggagcactcactgtaggttaggagctggcattcctgtcggggagatgggcagacaaaaagtgtcataatgatggaaaacatggcagtgtggagggccagagggcaccatggcttacagggaactcagggaaggcctcattgggagaatctgtttatgttgagactggccaagaagcacttagagagaggggttcccaagaagcggtaagagtacctgctcctctccaaccaccgaaggcgagagcaggcctggtggatctgcagatgtatcaggggtcaggggagacacagcttggggagcaaggggagagcattgaaaatgaaaactggagaaagaggccagggccagagcgttcaggggtgggggagatggggagaaataaggcctagagaggttcagtgacttaacccaggccacacagctaacagacttcacatatccaaagaaagtcccagtgagaacattcaaatgcattgagccagacagggaaggcacacttaggggcttggaagatattaaatttcacattttcaatgccacaaaggctgagacaagggagagactggcaagcatgagaggggcttgaggggtgttggaggtgagcagggacaggcgggggtgcagcaagtcatggcaggggagttaggaaggaggaaaggaggtctgttggctgccaggtacaacacaggggaagctgctgttcctttcctcctccagccccgcagcgttaacctactccgtgggggctcagcccacctctgtgagctggactttctttttctgttgtataataggcgccatggcagtaaatgccacctccctggctccctcggggaagccccacgccttgattattcctgagaattggtgacattctgtggctgctccttgtgggggaggcacaggtctggcccacctgatggtttttgttcacttcttgctgtcacttttgaaagagaggaaggttttacatacacataagtaattaattttgttctttcttattctgaacgtcccacacatcagcagaaaaccagaaagacttcttcaggacagagaggcacaggagagcaatctaagagaaatgtgttttcccttcctccctccctcctttcttccctcccttcctttctttctttttaccaatatttgtcagacacttcttacaggcactgagactataacagggaaaaatgcgagctccctgcccttgggaagcttagagtctgaccctccactttagactgaggctcgagagaagatatttggccacagctacaccagttttacctgcagtgggataagatctaagcagttagacttactgggttttatgggaacaccaaggagaaacatctaacccaggatgggggtcaagggtggaggaggacacagggagtccgggagggcttcctgcatgggagccctgattctgagacttgcaagatgagcagaaagaagtcaggagtaaagagatgaaggagggacacagcatgaaaagagaataacagaaaaggaaatcttctggaaacaagaagttcaatttgaaagtatttgtgcgctctgccccacgcccagaaattgttttctcattttcactaatttgatgtaaataactgtacactcaagctctgacaatgctgggaccctgtgttttcacccctccacttacaggatcactttctagttcaaggcaacacagtttgttctctcaatgcacctatgcactctcacctcaaataagaaaccaattaccttggcttttctgaaataccaaaaataattctcattgtcccatcattactactagtaagaataatatggctataataatagttaattgtaccattcataaatccaaaagtgtttgtgtgcatgtacttttttctcaagccctatacaaggctctagggatagagtggaatcacaaacaatgacacttcttggccttgtggagttctagtctagcaggggaggccgatcgacgatttttttttttttttttttttttgagacagagcctcactctgtcgcccaggctggagtgcagtggcacgatctcggctcactgcaaccttcacctcccaggttcaagcaattctcctgcctcagcctcctgagtagctgagcttacgggtgccaccaccacactcagctaattttctgtgtttttagtacagaaggtgtttcaccatgttggccaggctgatctcaaactcctgacctcaggtgatttgcctgcctcagcctcccaaagtgctgggattacaggcatgagccaccacgcccggcctcgatgatgattatataaccacacaggtaaacgttgatggcactggtaagagtaccacctatgaggctgcaagggccacaaagtctctagcagaggctttgacctggcactgagatcaggataggcctcgagggaagatgggaagggcctcagagctagtgagctgaaacaagaagtgtgtcccaggcagagggcagagcctgtgtcgaggctccgaggccagtaagaagagggacaagtacaggtgcctgaaagaaagccagtgagctggaagggagagggagagcatggatggtgtgaaatgaggctccagtgatgcagtttcttttaatatttcagcctctgctcagatccttaaaggcgctattcacatctttcaataatctcacaggatgggtgatagtcatccattttacataagaggaaactgaggtttagaaataatgaaaagccccagcctcacagtccatggcagagagaggatgggagtccagcttagaccctacacatgtgttccttctaccacatgactcttgtagtcatgtcatctcctgtctgtacctacaaagggctgtttaaagatgcccagtgtatgttagatgcttgcaatagtcaaggtcagatactcacaaacacttagtaaataaaactaagtaaggaataaatgagtgctgacatactcatcaacactgatatttattgaatgcctcatatgtgctaagctcaggctaagcacttttcacatagtatccttcttaattcttgcaacaactttttgaaataggcatttttattactattccccctgtgctgctgagaaaactggagctttaagagctctagtgattgtccaaggtcacgcagctggtgagggttgaaggtgggactcaaactcccagccagagcctgaatcttaaccctccctggactgcttctggtgaagcaaagcaaagtccatggaggctcagtgtgcaagacagttggcttggccacttggggatggagccttcggaggccttttcaggagaaagtgtggatttgaactgaagaattgcataaaaaaggcagggggcgggcatttggaagtcctttggtcaaaaacacctttccattttcatgttggagcctccaatacattatatgttccatgcagaatacgaaagaagtctgtgcaagatacagacccagattgaattacttactattcatttcgtgtcacgtcaacaaagatgggaaccagttaaggaatgggggtggatctttataattgagaaattcagatgttctgaactttgggacctgagatgatctacaaatccagacatgggccgagacatggcaatacgagggaagaactcaagcaggaggagaaaagactgcctatccaggcaatagcgtgacttagaaacaggatttgagtaccacttcatggctaagcatgtgcgggatggaaccggtcttcctgggcttacatctttgctttgcctcttctttccctgtgatgagtcttggggtaggcctcaaaggctgaatcttcaatataaatacaacagtgaatgaacaacaaatggttattttaaagatctatcttggatggctatttaatttcactaaaccccaggttgctcacctgttgactggaacaaacaatagtcccttcttcatgcgggcatggtgagggttttaaccccgcattgtccacaaagaccacttaaattatagtagatgctcagcaaatctgagctattatttttatcacgactgtcagaggtcagatcaggcttcggggtcagacacacctgggttcaaatcccagcagggccacttactgttggagccggggcaagtcagttattctccctgagggtcagttttctcatccctaaaattccaactaataatactcatctttcagtgatgccgtgaggtcttaaaaataatataggttcagattgataaaacaggctggcacaaattggatggcagcaaatgtccttgcagccctgtgtctcctgccttagtttgtgttgaggattaggtcagatagtgtacaggggtgggggctgtcagcgtggatctggcacacacagcaagtgcctgaggaactgctttcctctcaattcccttcccctcaacccccagcccttgatcacctaaagaaaaaaaccctttcatttacttaaggtttaaattaagatgtgaaatggatggtgccactttatttgaaggaataaagagagattgtaagtatagatttatctaaaacagctctgggaggggtgggggggataaaagatatgcccctgagaaaaaatggaatgtagcattaacctgcatttccttccctccaactttcccattctcttcctgccaccagccaccttgcaaagccccacttgttacaacacacatttgctggtggctaagccatgcttgggaagaactgcactggagttttcagtgaaggtgatgatgatggtgatgatcatgatgatatgatgatggtgatgaggaggaggaggaggaggatctgatgatgaggatatgatgatgattaaatgttgtaacacacgaacttagaatagtgcctggcacagtatccattatcagaaaatccatgtcattcacattagtgggtgcagcgcaccagcatggcacatgtatacatatgtaactaacctgcacaatgtgcacatgtaccctaaaacttagagtataataaaaaaaaaagaaaagaaaatccatgtcattgatattgacagagaactaacatttattgagcactgtttgaatcaccacataggttaattatattatcagtaacaatgaagtgaaaggaacctcttcttttaatccttttttatataaaataatatattctcatatcatctctgagaggtagatggagaccctaccttcatttactaatttacctttaaggaaactgaggcatttttcaataaaactgggagctatgtaggaatctggccacagtgaaatgcacctgtagagggtatggtggagatgcctttggatgtctgatactatatccttgtgcccacgcctggcttctgcttgttttcccctctaatagatgcacctgcagctctcttctgaggacatctcccagctcctggagctactctgcttgcacacacagagcacccttggtgcctgcaagtgtgtgcccctggctggccttgagttaatgactgatgtggagtaccagagcccaattcttgcctcccgagaggccaagctctgagtcctaagctgctagggccttatgtatcctatctcaattaatctttctcctaaattctataaagaaggaactatgattgcacccagcttacaggtgaagaaaccagccctcagagatgtgaagtgaccaggaaggccacacagctagtaagtagcagagctggaaactaagtatagacaaatggaggatttgcctgaagccagaattttggctgaaatgtcagcaccattctggcatcccttggtgaaattctgtgcatagtacaccaaagcgtgagatgcagacacaccacttatttgaaggagagaacagatgaatgcctcccccccaaaaaaagcttaaatatccccaaaattcaaatctttgaccaaggcaactttctaccactcggggccttcagcaaattgacacttcaaatgtgcatggttttatttggtatttttttatcgatggagaaaaaaatgatgtttcaggttatgcttttttcaatgctacatttctcaatttcacagtcaaataattctatttttgttcaccagaggattttgtcatctttaattgtttatgactaccccctccccctgtacttgcgggagcctccacttttccccctgctgcctttcgttagactctcccgtgagcagtaaccatggagatgggtccctattggatagtctctgctctggcttagaagtcaaagagccaatcaggacctcgtcatcccagaaatgtaagaggatgaaaaatgcgaggcctttgtaagtggaggggagacctgatatgcagtctccagagacagggagttcctgatgcctagaaatcctgggaaggaaacacacagcagctaagctcagtggggaaaaacatgggtcctggaactgctggagtctggccccagggctgagtctcctcttcctggctgagggacctgggtcagggcacaccacttctttgaacctcagctgtctcttctatcaagcagcagcaggaaggctgagctcacatactgttataaagataaaattaaatacaacccactaagcacctgcctagccctgtatcaggcatgtagaagtcctcaattaacaagagctactctcataataactaaaaatatagcaaccctagaattgaggctgggtgaacaggtctaacagccctgccctcagaatgtttgctgcccatcacggaaggaagacaatgaaaccacaaggcttagcctctgctcactgctagcacaacagaagtacggagccagtggggaaaagaggggtcaaagaagtctaaccaaatgagaagagatctaggctgagtctggaatgatgaaaaggagctagccaggaggataagagggaaaagtgttgcggaaagaaggaacggcaagagtaaagtcttgttaagtgagagagagggtgtggttcattccagaaaatgcatgtggctcagtatgattgcagagagcccagttttggggagcagatggcagagagaggaggctgaacagacaggtggctggtggatgtgcatacaatggcttctccttgggtgcacaaactttgtcttttcatgatcatagagacagatattcaattgaggtttgctttatgaaatattggagcattgtttccatgaaattgactttgcagggctgggaagtgagtggagaagtggatttttttttttcttttgtgacggagtcttgttctgttgccaggctggagtgcagtggtgcgatttcggctcactgcaacctccacctccctggttcaagtgattctccagcctcagcctcctgagtagctgggattacaggcacgcaccaccacacctggctaatttttgtatatttagtagagataaggtttcaccatgttagtcaggctggtcttgaactcttaacttcatggtctgcctgcctcggcctcccaaagtgctaggattacaggcatgaaccaccgtgcccggccgagaagtggacttttaactgagcctccagttgacattggatacaaggtcgacctccacctcgaagctctgggagggcaggggctgcatctgactggcttcctgttgtattccttggaacccagactctacaaatattggataaaagaaaggaaggaaggagaagagagagggagaaagggacatgctatctaggaagtgattatacttccttttgccatcctccatgggcgaaatgacaataatacttacgtctctcatccgtgaggcagatcaaatacataaaagtacacaaaacatgaagcacagtccccagcatctaacataagcccagtgcaaatgaatcttcaggctttgcacagccagaaaagtatgaggatgtaagaaacatttccagcctgccgtagaaaggactaacactctgccaggatgtttttgcatccggggtaagaaatgtctatgctaactcttggaggaactgctgtgtgccaggctctgttctgagtcctgggctacaccagagaataagagaaacaggggatgcaggttgataataatactaagggctaacatctattgagcacataaatacaagtaacaatttctgagaatgaggggctaccaaggaaatatggggtagtgcaagggactgtgacagggccacctactttaaatagaggagattgaaaagacaggagtcaggtggcaacttggaagcagaacatcccaggcaggagaaacaggagcagggctgatatgtttgattcagagaaaggccggagtgtcatgagctgggcatccagtggtgggacatgaattgtgggatgagcatgggacaactcagggctttgtagaacatgctaagaactttggattttttgagaccatgctaactgggtggggaaataaaagaacgttggatttgtttttcattaggtccactgggaagccattgaagcagcttgaacaggcatgtggcatgatctactttctttctttttttgagacagagtttcactcttcttgcccaggctggagtgcaatggtgcgatcttggctcactgcaacctctgcctcctgggttcaagtgattctccttcctcagcgtcctgagtaactggaattacaggcatgtgccaccacgcctaattttgtatttttagtggagacagggtttcactatgttggccagactgctctcgaactcctgacctcaggtgatccacctgcctcgactttccaaagtgctgggattataggaatgagccaccacgcccagcctactttcatttttataagatcactctggctactgggtgtggaatggacaagagggtcaggagtgaaagcaggaggccagcaaggaggctgttgggagaccgggaacagatggccttggttggagcctcagtggaggcggtgagcatgggaaggaatgcgtggacctgggagaattctggatcactcaggaccatgcttgcctagggaggagaagggacttcaaacaaagaagacacgtgttcatggggacagattctctcagcttcacactgtggggccccgggtgggctctagaggaccaggatacaactgctcttcccgaatctcccctggaccacccggactcccaagcatgccatcactgcccatctcccaagaggaatccattccgataaaagtaaaccactagtggccgggcgcagtgactcacacctgtaatcccagcactttgggaggccaaggcgggcagatcacaaggtcaggagatcgagaccatcctggtgagacctcatatctactaaaaatacaaaaattagctgggtgtggtggcgcgtgcctgtaatcccagctactcaggaagctgaggcaggagaattgcttgaacctgggagacggagattgcagtgagccgagatcgcaccgctgcgctccagcctggcgacagagtgagactccatctcaaaataaataaataaataagtaaaccactattttcatgcttctccaggaattacgaagtgtaaagacaaaaggtcccgctgtgctcgccttcctatttttcaatcctaatttcattcctctctccattctgtaattcagctccccctcctctgagcctccacagtaggtggtcctgacttctgtgggagatttactggagagatgacatggaggaacacattgtctttttcaaaatgatttagtgacctttttggcatccccgtgattactgaaatcttgcgtaattattcagtttgccagcagagagttctgttgatcaggggaaagctgaggtagatgtcagatgacagtaaatttgcaatccataattgtaaccacttgatgctggagcagaccagggaacaaggacttggtcacaaggccatggatggttgaaccaatacgagcaccaaattatctcacgcatcacacatgcagaaacgttgcctatctttctttcctcgctagcgctctttctctttctttgcctctttttctctatctctatcactgtcttcatccccttccctagagatgggcacgttgaatactctgctctaagtcttctaggtccatttccacccagagccagtgatgccgtaaatacagccacaggtttttcccccaagaattcccataagctctttctggtcttactgttctggtctgtttggcccctgctggagctcaagcattgatttttttctgctttgcttgctttctgacagcacggcttatattggaaaggtctgtgtcaggaattagagaacattcctaacaatggggaaaagtaccctaatataaatataccatttgtggacttgcactttgacaagtgcaaatgaactggaagacactggaaaagctctgaagtcatggaaacatgtaacagaggcatttacttaataactcatctcattccttgagctcaccttatcaagctttaacctctgagtctctaagttcctagttcaaaaatgcagagtctcctctgtcctcatgttaatttttaaattatatatcattgtagagaggcccttatgttgaatattatgagccattttcatatctgaaatggggaattataactgaacattagcaattgcctataaatctcagcaagcaaagtggcatctataatacatggcattaactggggagaaatgtggtgcacaaaaagggggatttagaggggtggaggtgattttcaagaggaaaggctgcaggtcgatgagcacaagccccctgtgtgctgtataattcctaaaatcttagtggacctgggtggaagtttgttgacacttttggaagcaatggttaaaactgttcagcatgttgcctgggcacgctggctcatgcctataattccaacactttgggaggccaaggtggatggatcacctgaggtcgggagttcaagaccagtctgaccaacatggagaaaccccatctctactaaaagtacaaaattagccaggcgcggtggcacatgcctgtaatcccagctactcaggagactgaggcaggagaatcgcttgaaccaggaaggtggaggttgtggtgagccgagatcgcaccattgcactgcagcctgggtaacaagagcgaaactccgtctcaaaaacaaacaaacaaacaaaactattcagcatgttaagtctacattgtgtatatcaaaatctcttatttacaattcactgcaaaccacatcaaagttaagtaaaataagaaatgtaccgtctcatccaaggagagagttggattcatacatggaggaatccttggttcaaaggatgtatgccgtcagaactttgtctttctccacctttccactcagatgttccttgtgttgtctcattattaggcaaatggcaagattacctggaccagctccagggtctaaagctaggatttagctccaggcctggctctttcatttttttttttttggaaccacttttttaggtggaaacttccttggaagttgagaaatttgtcctaaggcttactaggaattggcaaaagggcaataggatatgtcattccaggacagtgtgtctgccagccaactggaatgcgaacagggcactctgcctgggaatatgagcagctgcgtagatctatccacttttgctggggatcaccagtgaggaaccatggtcaggctgcctgggtttaaatttagggtccactactcactagcagtaagagcaaatattctaacgctctcagacacagtttcttcatctataagatggggataactgttctacctcaggaattgatagagttaaaagaaataatccagataatgctttaagccagtggttctcaaacttgactgtacatcgcaatcacctggaggtttgttaaaacccaaaggactgagcgccatcccccgagtgtcagattcaataggtccagggtggagcgagaccttgtgaatgtctaacatgcacccagatgataccagtggtgttggtccggggaccacacgttgagaaccattgctttaagtacctgggcatgttgtaagtgctccagatagtttgcttttagcagctttcctcctgtctttgagcctgtctgacactctgtcctttgtgagatcttagcttactgcacaaaatcaagtcaaaccaacataggggtccatcaggatgacctattacaggggctaaacagagagcaggagctgaaatagagaagcaaaacaaggagaggcccaaaatctagaaaaggagtgggtagccaggaagtttgcttgagtctgctgagatcgcttaaagaggtggacaacctcagctcagttgcttgtactgtattaagaggaatttctcacctgatgcacatgaccggctatcaagggaagaggtcttcctcttgacttagcttaataccttccttaattctgaattaattggccctaaaagtattttggaagcaatggttaaaactgttcagcatattagctctatattgtgtttatcaaaatcttttatttataattcactgcaaagcaaatcaaaattagttaagtaaaacaagaaatgtggcttctctgtctatgaagttgccatcctattgtttctttgcttctctactaaacttgctttcactttgcaaaaaaaaccaaaaaactaaaaaacaggaaaaaaaaaaacaaggaatataacagctcatccaaggacagagttggactcatgcacagagcaatccttggttcagaggatgtatgccatcaaaactttgtttttctccacctttcagctcaggtgttctatgtgttatctcattctcaggcaaatggcaaacgtggaccagctccagggttatatcctatcagtttagatgcaccagtagatagagggcctgtttcccaagggtaccaagaaaatatggacatttggtttaatcagccgggaataaggaaagcacatacccttaaagcaatgcctgcaacttggagaattggatgctgtctttggcctgggttcaagtctctcctgtggaagcagtgagcagactcagcactgcacaacttgggctgagattggtccacccagaggagttttgatgtcattgttgcttggggaagaatgacctcaaatccaactaacacgctcctcctgccaggactgatgcagtagccaccttcaggtcttctcatctctacttactaccctgtcccagtttggccagcacagaacttccagattaagtcataattcaaagctcatatcacaatgagaagagctaccatttcacgagtgtttattctgtctcaggtgcttcagttatagtccttctgatccttatattagcctttctcatcatttaaatctcagcttaaacatcgtcttctttaaggattcttgcctgaaagcctatctaaatcagttgttgtctgtaaaagcccagatagatagctggagcttggcctaagccatcttctcactttcctgatattttctaattctgaaatggtaggtagccttactcttctcatgatgtctcagcttaggatctatggaccttccttttttctgtcatctctcctcacactcttcatttattccatcactcatttttcttgattggacctccatgatgcttttcccatgtcacttccacttccatttccacaggagccatgtcatttgaagtataccctcctgttgccaggactgatgcagtagccaccttcagttctcatctctacttactaccctgccctagttttcccagtacagaactgccagactaagtcataattcacagctcatatcacaataagctaacatttcatgagtgcttattctgcctcaggtactttaattatagtccttctgatccttatattaatctttcttatcatttaaatatcaacttaaacatcatcttctttaaggactcttccatgaaagcctatctaaatgaggagtcatcaatttctttctacaaagggccagatagtaaatattttcagcattgtgggccatgcagtctgtgtcacaactacagctgacccttgaacaatgagggagttagcagtgctgatcctctgcataatcaaaaatccacagataacttttgacttcacgaaaacttaactacttatagcctattgttgaccagaagccttaccaacaacataaagtcaattaacacatattttgtatgttatatgcgttatatacaatgttcttacaataaagtaagctagagaaaagaaaacgttgtcaggaaaatcataagaaagagaaaacatattaactattaagtgaaagtggatcatcataaaggtcttcatccttgtcatcttcacattgagtaggctgagaagaagaagtaagtagaggggttggtttgctttctcagaggtggcagaggcagaagaaaatccatgtataagtgacccacacagttcaagctcatgttgttcaagggacagctgtattcaatcttccattgtagcataaaagcaatgatagattatatcccagtgaatggtagtgactatgatccaatacaactttatcaaaggacactgaaatttgaatttcttgtcatttttgtgtgtcataaaacatcattcttcttctgatttttcaaccatttaaaaatataaaaaccactcttactttgttggccctatgaaagcagatggcaggctggatcaggcccacaggcaacagttcaccaacccctgatccaaagcaatccagctctctcacttttctctttctcgtcaccctgttttatttccttcataaaattacaactatctgatatcatgttgtttatgtattttctcatatctagcactgtgctaggctccaaggatacagcaatgaacaaaatgacattttcctttccttcacagatcttacattcttgttggaggaaatagacacaaaattaaaaaataaataaggccatttaggatcccatgaagggaatagagcattatgggcctgggtagcagtggtgctaatttactttgggtgctccaggaagactcctttgaggggcagcttctgacatatgaaggactgagggagccacaaatgagaagaagaggatttcagacagggacagcaagtgcaaaggccctgaggcaagtaggagctgggctcgttgtggggaactgaaagaaagccagtgtccctggaatgctgtgagctcaaggtgacagactcaattgtgcaggccatggtaatgagttcagattactctgaatacattgagaggctttaaatagggaaagagcatgacccaatgggcatttttgaagatgactctgctcctgtgtgcaggaatggattgcacacaggacatgtatgtgtgtgtgaatgtacctttccttccttatcaggaagctccttgaagacctcaggcatatgaaggcctcaacaaaaactttataaacttaatgcatcaattaaaaccattaacacagccacataactttttcttaacctcctcactagcaatcctttttatagcctggttcccaaagcaggtcaatttatatcataaaactcaaaaattacagcttatagcataaaatgacctcccatgatataatgtggcaaaataagcgaattaataccagaggtagtaaatgtctgggcactaatgtgacttgagtatgaaatatgtttccatcgcattaggagtaaggatccaaaatgagagggggatcggtgacctggcaccacctacatggagctagctatgctaagtcctggtttagaagatccacttggtatgaatgcaaccacttaggtatttttgattcttctcatcatttagtcaacaagtcgtttttttgtttgtttgtttgtttgttttttgttgttgttgttgttgtgtgtgggggtttttttgtgtgtttttttgagatggagtctagctgtcgtccaggctggagtacagtggcgcgatctcagctcactgcaacctccgcctcctgggttcaagcgattctcctgtctcaacctcccgagtagctgggactagaggtgcgtgccacgacacccagctaattttttctatttttagtaaagatagggtttccctgtgttaaccagggtggtctcgatctcctgacctcgtgatccgcccactcatcctcccaaaatgctgggattacaggcgtgagccaccacgcccggccagtcagcaagtattcctaaaagtaaactgtatttagatactatgccaggcttgtatccagaaatgagcaaggcaaagaaagcctctggcctcatgcagtttatgtgctgttgctgtcatggagcaaacaatttaatcaaagagaataatttcagtgctgttagttgtaagaatgctgagccaaaaaatggggaaatggaaggctactttagatgggtggtcagaaaagtcttttctgagaaactgacatttttgctgagacctaaataatgagaagcagccaggcatccactgagtcaaggaatgagggctccaggcagaaggaacagcacatgcaaagttcttgaggtcaaaaaaagcttggtgtatttaaagcattatctagtacagaggtttgtaaacctcttttgtcaaaaggccagatagtaaatgtctgaggctttgtaggccatacagtgtctactacaaatcttcaactctgccattgtatcacaaaagcagccataggtgatatgtaaatgattaagcatggctgagttccaataaaactttatttatgaaaataagtggagggccagatttggcccacaggctagagtttaccagcctatggtctagtaggatagtgtctcatgtgggggtcctagaagcagatcctgacatcagggttcctgggctattaaacctattgaatccctggtttctcaggaatgtgctcccaggaagaaccagtaagggagtagggaagcaggacagggaaggaaagaaagccaagcaagtcctagcctctgcctgatcccatggggagcctcagagttccacctgtctgtaagcaagggctgggctaccttggctaatgactgattgactccacatcaatcagtcattggctcaaggatagccaggggtacacacttgaaggcagcaagggcactctgtgtgtactggcagagcagcttcagcgaccaggggacatccccagaagagagctgcaggtgcacctattagaaagtaaaacactcagaagccagacgtgggcacaaggatatagtatccaaaatccaaaggcatccctactgtgtcctctacagatgcatttccctgtggccaggttcttatctagctctcacttgcatagaaaaatgtctcagtttccccaaagttacctttgtgaataaaggtagactctccacctacctctcagagctgatgttaaaatatatcaagttcttttgtccaaaaaaaggatcaaaagaagaggtgactttcacctgattgtcactgataaaataattaatttacatagcaattcaaaatagtgcaaatatacaggaatcacgtttttgaaagtgatcagagaagcctggcctctggcttagcctttcatatgcagatcagtgagggagagggaactggcattgactgagtacctgctgtgtgcattgtgtcaagagcttttctatcttttttctgatttaacccttaccacacgctttaagtagcgatattacccccattttatggatggggaaaccgaggttcaggtataagcccctcaagggcagaacaggggctgtaaaatttaaaatccttaactcatattcaccgaatggacctcagaaaggtctgtaacatactgagggtgaccatgactgacaggtgacagagttaggatttaaggccggttctgacactgaagtctgtgcatttttctagtggcacctttcagactggtgattcgaaggaataaatacaaaatggctagccagtggcgtcatgcagtgctctttgtataaggaggtggcattcctgtgccaagcatgtgatttgtgtcaattgcttgctgtcgtgaggaggccttgccgagactccttcacacattctcactgtgccactcccagatcagaacagacacatgcagtcctcttatcctgttccctggacaaatctttcccaagacggaacctgggacatgcctaataatgatctgacttgctggttcaatcaacaaatatttattcagcatttattatgtaccaggcaccatcaaagccctgaagacacaaacttttatgacaatcataattaacatggagttagcgccctaccagtgttatctcattattcccttcccacatcctccaaagtaggatcatgggtccccatgttgtagaagaaaaagctaagccttaaagaggttaagtaagtggcccattatcatacagttaggaagcagcagaacaagaattcaaatgcaaatttgccaaacttcattatcactgccagaactcatgccctgtcctgattcttgcaaaaaatcagggctaatagttattgaatgcttactatgtccgaggcactctttaaaactctttacatacatcatgccattttatctttcctgccatcacaccagataggtccctgtcatcacccctattttacagatgaagtacctaaagtcaacagaaattaagcgccttgaccatcaccacacagctttcagctggtggagcttggatttaaaccccagctctgctggactttagggcttgctgggaagcagagttataattttttaattaccaaaaaaaggaaaaaataaaatagtaagaagaataaacatatactgaaagcttacttatgtgccaaacactgggtttagtacttctttgttttagcttattcaagcttccgtgctctgggaagtaggtgattttcttattcctattttacagttgaaggaatggaggtatagcaaagtgaggtcatcctacccagtcacacaaatgttttgtgatgagggcaaaattcaattacagattggtctgactctccaagataaacagattaaccctatttttatccagggaagattttcctgcatgcttggtctgtgacctgggtttatgaagaatgaatagaaacctgtgctcgcctgctccatccaattgactgcaatatgcaaaagaggcttgaatgtagagcttcgaggagtttggggtgaaagaaggtggcagaaggaaagtaaaaacgggtacagtaattcccagggctctttgtcaagttcctgaccaaatgcccggcaggggctttcttcctcttcttccacttcttccttcattcataagagttttaccgcctcgaacaacgtgaaatgtgtagcttgggcttgttgagaatggagtgtgtctgttaagtgttgcttcttgaatgctggaccgccacctccatcttagttacgcacgcccatctttttcaatctaatgaactccaaccatcagtgcaacttaagttcggctgtctgttcgtgcatagttaatattaaaaatgtactaacagtgtggctgagaaatcaaattatgcacataaatatgctggcatagcacaggcggcggcagaagctgaagttagcaacactgatgccagttcacatttgcaaatctcccgtcaatctgtcattaaacatgttatcaaatgatgataagtgtatgcttcttgcttgcattggtgagccgattcccgatgttgatgcacattaatgggataatacgcattaacatagttgtgcttggatgaacacaaaacattttttatctgtctccgtttgtttccccctgtggccccgaagtaagtgttttgtgttatcaaattgccaaaaacacgggaaaacatattacttttaattagcaaatcttgttgggattttcccccctacacgcccgtcccccccacccccattgtgtgatggcaataagagagagaaagagagaggagagagaaatagagagaggaagagagagaggaactctactgtcttctttcagtaaaacgattaatgtcagcaactcagaagctggcaattatgttctgtcttaatgcactggcctttcatctggggcccttactcttgacaggcctgatcgtttcagttcagtgatatgaaaggcagcagaggaaatgatcgtagacatcccgggtctgtcacgagggccggcgctgcaattcggatccagctccacgttctgaagctgttcagcagagtcagaagcacaggagacagatggtggccccaggcattgcccagactttgggtgtcactgtgctgagtggggaagttgtagctaccaccatttcccaaacttaagaactgggaaaatgtgcaagcccccacaaagtgagaaacacggtattaaaaagttaaatgtccttttgcgttgatcacagagcaccagctcaacgcaaggataaacgtgaatgcgggcagtgatttcatacagcagtgtttggataggagtctcttctcctgaggatccaggagaggattggattcatttttcaccaaaatgaaaataaaatttagatattcttgattgaaaattcagaactttatgaaatttttttgcagatgttgggtcagtacaatatctgagaaatggggccaggtgcggtggctcacgcttgtatcccagcattctgggaggacaaggcaggcagatcacttgaggtcaggagttcaacaccagcctggccaacatggtgaaaccccatctctactaaaaagacagaaattagctgggcatggtggtgcctgcctataattccagctacttgggaggctgaggcaggagaattgcttgaacccaggaggtggaggttgcagtgagccaagatggtgccactgcatttcagcctggggccgcagagcaagactccgtctccatctcaagagaaaaaaaaaagaaagaaagaaagaaaaagaaatggtagtggtgcccagcttcctttgtgaagtgatgttctgagccattagggttatatatgtttccacaaaggatctgtcaggacatctttgagattggattgattcattcattcaacacagatggattgaatatctactatatgccagaattactgtagcatcagggagtaggacagaaatgattcctaccctcatgaagctttgggtatttggggaagggaaaacagaggtttttttttaaattgctacataataatcaatttatttttattatgaaaagtgaaggtagaggtatatggagtgcagttgttgtagcatttacttctcgagctcagtggaaaatgttttctgccattaataatgccaaaaggttatgtgtttggccttcctggattcttgtttacatgtgttttaaaattaacattgacttcttgccatttgtgtttgttcctaagcggagtgagcggcttattaatgattagaattattgttgctattatgaatgcactaattaaaagaaaattctgtcatgaggctttgtgaggcaacacaagactttacagttagagacgtcaggtctggaagtgtggagacaaaagtgtgaaataagaaaacagagttcaggatgaggaaaagagttctcaagatgtctacagtccttcattagagattctttttcagggcattttccctagtaagggtatgatgaaaatccagttgttttttgattggaggtgtcacctttattgtttttctttttttttggtcttagggcagaaatagccggcttctctccaacttgaattctaagaacattttatcttctacagctttattcaaatatgtaaaaacaggcacagtagctcacacctgtaatcccagcactttgggtgactaaagtaggaacatcaacggcttgagcccaggagtttgagaccagcctgaacaacacagtgaggtcctttctctacaaaaataatttatttttacttagtcaggtagggtagtgtgcacctgtagtcccagctacttgggaggatcacttaatcccaggagttcaaggctgcagtgagctatgattgtaccaatatacttcagcatgggtaacagagcaagaccctgtctcaaaaatacacacacacacacacacacacacacacacacacacacacgtaacacttctgaattgatgaccagatgccagaccaaggatgccagaccaggacacagttcctccccgaggttcatcatctaggggacaaggaagtgaagcgaatgcacaatcgtagtgcctggacacattgctgtgatgggaaagatacaggtgcacaaaagaggggcacccagtcttgtccttcgtagtaggaacaaattatttctttatattgtgaataagtatttatttaacatactcaatatactgaactttttcaaggagacaaaaatagacataataatgatacgagcttatatttattgaaaaattacatggcacttctctaattgttcatttgaattgtctgttctctaattgtctgttctcttgctggtctttcccactctaccttgagcctcaccagggcagacactgtgtttatcagaactcatctccagggtctggtccacaaggggtgggcattttcatgtgcattgacttacttttcaggagttacagtttagatgttggaggttaaaaggtgattgcaatacaagtgcagtataagtaacatgtgtaccctaagatctgtcatgggttcagaggaatgaaactgaacccaccgcatcccacagagtgagcagctgttacttatctgttgagtatccccagaagaggaagtgttgcttgactgtctaagaggttagtaaacttgcatggagactgagattggaaaaagcttgggaaataattagttacagtgagtgccagggtagtggtattttggatttcttgtccttctaaaattgtttttctgtggttaatatcaccttgaaaacaaacaaaaatcatggtagatgaaagtagaagtcattttttaggagttaatatttttcttattcaacctgaatttcttgagtttttaaaacttttaatgactcagctttttttcccctccaagagtatttcaaaatggaaaattttatattctataaaaatatttttcaaatctcttcctgacatttattggagaagattaaagtctttaatcctcaagctaatttctatgtggtcctcataaaattccactataattccattatcgggaggctggccatagaggaaacttgagtcttcaacctaatgtaaaaatctgcctttagacagatgtgtagatttttcttaatgtcaaaaactagttaccggtaggccaggtgcagtggctcacacctgtaatccctcctgcactttgggaggccaagatgggcagatcacttgaggtcaggagttcgagaccagcctagctaacatggtaaaaccctgtctggactaaaaatacaaaaattagccaggtgtggtggcagatgcctgtagtcccagctactcaggaggctgaggcaggagaattgcttgaacccgggaggtggaggttgcagtgagccgagatcacaccactgcacactgcactccagcctgggtgacagagcaagactccgtttcaaaaaaaaaaaaaaaaactagctactgttcaataagttttaggtttatattgacattaaaatttgttaatagaagtctagttttctcacatctgtgtttttttgccaaagtcttggagaatgaatagtcttggcatcccatcaacagtgattgggaggaccgctcatttattcattcaacatatttttaggtgcctaccattgccagacactgtagtaggttctggaagcttaggactgaacagagacaatatttctgctctcaaggagttgtcattctagtgggaaagacagatcctacacaaatgaaaatataatatgcctgatgctaataagtgctaagaagagaaaaagaagagcaatagagaggaaggctattttatttattcatgttttaatattttattttattttaatttaattcaatggttttggggaaacaggtggtttttggtaaaacggataagtcatttaatggtgatttccaagatttcagtgcacccatcacctgagcaaagtacatggtacccaatgtgtagtcttttatccctcaccaccccccaccctttgccctgagtccccaaagtccattatatcattcttatgcctttgagtcctcataacttagctcccacttaaaagtgaaaacatacaatatttggttttccattcctgagttacgtcacttagaataatggtctccaactcatccagatagctgcaaattccatgatttcactcctttttatggctgagtagtattcagtggtgtatatataccacattttctttatccactctttggttgatgggcatttagactggctccatatttttataactgcaaattgtgctgctataaacacgcatgtgcaagtgtcttttacatataatcacttcttttcccctgggtagataccgaatagtgggattgcctcattaaatggtagttctatttttagttctttaaggaatctccacactgttttccatagaagttgtgctagtttacattcccaccagcagtgttaaagtgttccctttctaccgcatccacaccaacatctatttttttttattttttaattatggccatacttgcaggaataaggtggaatctcattgaggttttatgttgcattcccttaataattagtgatgctgagcatttttccgtatgtttgttggccatttgtttatttccttttgagaattatctattcatgtcctttggaggaaggctattttagagacatggtttagggaaagcttgtctgagaaagggatgtctgagctgagacctgaatgaatcaaaaaaggaagacatgcaaatatctgggaagttgaaataaatcagcttctaattctgatggcaattagctaagtcataaaaagaataaaaccatgatcaaacaatcattgaaaattgaaatgattgaaattttgcaatgagtgcaaaagactattaattatagccaggggatcaaaagacaatgaaatctaaacattttctacattgctattatttcaatgataactttcatttctgttcccagaaattgcatgaagagttgtaaatggcctgagaatgagatttagtggtttttaattcagaggattagttgtcaatatttaaaatcagagaaatttacattaaactccatattttcagcttctcttgaaaaactagaaaaattgtcaatggcgttccaccttcctatgtggagtcagttggagctaagggatattttcccctttcaacaggacgtgctctcttcaggttaccacaatccccaccacctcctactaccctaccccaagcccccaccctcgtttatattttctgcttggcccctatatgcactgcaatttgtgatcacaacttcaaaggtttatagggttaatacttcactgttcattttggtggattcatgatcatccaaaccttagcttacatctatcactaatttaaaaagtactctaaatcaaaaactaagtaattttttttaattgagcaaacatttatacaatgtctactatatgaaaggcaaactactagaaaaaaaaggattagagttaaaagacacaggttctcatctccaggagttcactgtttattggggaataaaagtatcattctaacaatgtcccccatatttttaaacacttttaatatagtcaaagcactctgagatctgttacttcgtttggtctatccagaattctaggtaagaggaaacacaactattattggtttcattatgggtattacgtgcaaagacaggtatagagaggtaaatgtatttgtccaaagtgacaaggctgccagtattaaggccaaggctagacctgtagtcagtgtccactctcaaaagttctattttaccaactataatctccaaagtgctacctatgtcaagggttggcaaatccagcctaccacctgtttctgtaaataaagtttttttggaaacagccttgccatttgtttacatattgtctatggctgcttttgtgctataatgtcatatttgaggggttgcaatggagactgttatgatctacagaatctgaaatatttactacctagtcctttacaggaaaaatttgccgacccatggcctatgcagtagctgcttagtgagggtagatgtgagcgtaggggagaaagccatattcccatgtctcctcaagaacatgaaaactgaaggaaaggtcaccaattcacggtgaggggtgctagtcagttccaaataccctggtcaaaaatatcaagagcaggctgggagcggtggctcacgcctgtaatcccagcaccttgggaggccgagatgggtggattgcttgaggtcaggagttcgagaccagcccggccaacatggtgaaacccagtctctactaaaaatacacaaaattagctggatatggtggcacacacctgtattcgcagctactcaggaagctgaggcaggagaatctattgaacctgggcggtggaggctgcagtgagctgagatcaggccactgcactctggcctggacgatagagcaagactctgtctcaaaaaaaaaaaaaaaaaaagatcaagagcaaaattgtgggttcagttaggattctcaattacacatcacagaatctacaccagctaacagaaaaaaagtttcatcaaatgttattatatagttcatgggaccacccagagatccagagaatcagatttgaaggctacacagtcaagagttttgccaggactgtgctggtgggaccactcttgcactggctgtgctggacgtttgactttcctattaggagttctgaaacagctccctctgcagggcagatggctttcacccaggtcatgataaaatccgcctggcacctgcctcctcacagcacactcttctgaatcaaagccctacgttggtacatttggtacatcaaggcaaaccttaatttctgccttgaggaatgtccttccttccagtcaagttattgggatactgacaccatggtacagatgatattagtaatttctgaagggaaaaaatatagatatcacagaaagatagtcaggatagcatttaaaaaaaaaaaaaaagaacagatagggaatttcgttaaggggaattccaaaattgcccatgggaaaaggacatctttggttatggaacatttagtgtctggcctatgatggggaaggtctcacatataataatcttaataataatgactaattattgaggcttcggtccattcatctaggaggagagcatgattctgtccacatgttttctataccaaaactgctgcatggtgaactggtaatcctgacccttacaggggtagagagttaatctgagaccatctgtgccttaaacttccacactggaaatgagaggatttttgactgcttgtctggaacatttctgaatccagtagcaaagcaatcctagtagcctctctagccttccaagaactctttctgaagttcattagaatttcaccctcctggccagtaaatgcacacaaaccacctattttttttttttttttttgagacagggtcttgctctgctgcccaggctgaagtgcagtggtgcaatcatagctcactgcagccttgaactcccaggttcaaaccatcctcctgcctcagtctcccgagtagttgggactacacatgtgcaccaccatggccagattttttttaatatttttttgtagagatggggtctcactatgttgcccagtctataaaccaccttctggctacaatttccttttccatgctgcatgtgtactaacagtaactgcattacccagaatagaagctaacaatctgttgagagtttgctcactgtcaggctccagagcaatggctcctttaatccccctcaatggccctgttatcattttccaattcagacagtcagagagttgaagtaacttgactaaggtcacagatccagtgagtagcaaggctcagataaaagtcacatgcatctaacactacatgcttcttatatgtcccctcaggaatatggaataatcagagaagactcaatctcatcattggtccattcacagtcaatagtttaattaggtgggtagggagttttgatgatataagggtcgccattgaaaacaagagcaagaatttgaaacccaccaccattagcacaaaggccacgctcttaagcacagattgtatgagttatcttttaaaatctccgtggcatttctatactttttagtataaattaatacatgagccaagtgcagtggctcacacctgtaatcccagcactttgggaggccaaggtaggaggatcacttaagcccaggagtttgagaccagcctggccaacatggcaaaaccctgtccctactaaaaatacaaaaattagccaggcctggtggtgcaggcctgtaatcccagccactcgggaggctgaggcacgagaattgcttgaacacaggaggcagagattgcagtgagctgagatcatgccactgcactccagcctgggaaagagagtgagactctgtctccacctcaaaaacaaaaacaattaatacatgagaattccaggttattcttcaggccccctcactcttcaggcaacagaaggctgaccagtcttggatgttgtccagagggcatggacactttgagaagggggaaggcaaacaacagtgtggcaccagacagactggttatggatgctgctctgtcaattaccaggcatgtacccagtgctgtgctggtaaattttaacaactggctctcaaaaaaaaaaaaaaaaaagaaaagaaacaggtcctggccaggcatggtggctcacacctgtaatcccagcactttgggaagccaaggctggcagatcacgaggtcaggagatggagaccatcctggacaacatggtgaaaccccatctctactaaaaatacaaaaattagctgggcgcagtggtgcatgtctgtaatcccagctactcgggaggctgaggcaggagaattgcttgaaaaagggagtcggaggttgcaatgggccgagagatcatgccactgcactccagcctggcgacagagcgagactccatctcaaaaaaaatagataaataaaataaaataacaggtcctgatttgccgtgttgaccaatttctgtggtgtaaatacttccacagtgggaagaggcgcacacaggcagctgtcatgagctcttgtgagctaggaggggctggatcttggcaggtcgcttaatcgctctagcctccagagactgagcaaaaggcaggtacctccctcaaaggttgttaggcagattaataacaaaacatggtaaagcagttagtgccgaacctagcactgtggtagacgtttgctaaatggcttgatttactagttgagattccattaggtaaagtcctaatgtcttatgcctcaaatgttttaatcttaaaaatagtcataaaatactttccccacctcttgctcaggataattggaatgattgagtgagatcatctgcatcaactgctttggaagtccacaagcttataaaaaaaaaagagagagagagagacagagagtattttattaaagtcaagtcaaacccagagaataaatttttgctgggcaaaaattatacaactgagtcataagtttttagttcttctgtcatcattttttcctgagctttcaggttctcctcagctcctgatacttaaataattcccatttaaaaagcatttaattgagaggagcctggaaactcaccagctcagagaaaaattcagtccatcaagaggttctgagagtctttgggtttaagtctttctgatcttttactcctcaatcctctaatcctttttgtgaggaatctttcacaatccttgtttttagttcttatttctcaagtttccctttgaaaagcaggattcccatcacatctcaaaggtgaaggcagcataaagcctgcttccaacaacactactgcggttacataaagacacgagtcatttctgctgctggaggctccagtggagtgttcccttggatttgctcatttctttgcttggtcctccctgtgatcttagaggattgcagtatttatgaacatcatcttgttactttccatttagtacatttctgcctagtcattggtttttaattttgtcctcgtaccctccatttacaaacagaaatgtttaactaatgcttcaacaacccaggttcatggattgacactaattgctcaccatactcatttccatttgcaggcaaagccagacctcctggttgcaggatagcacagttataaaaaatttgcgttctgtggtccaaaaccctcctgttcaaatcttggccttgcagctttctagatgtgaattctgggcaaattacttaaactctctgtatgtccgtttttcctataaaaacatggataataataagacctatctcaaggggtagtaaagaaagttaaatgagtttatgtatacgtgtgtgtgtgtgtgtgcacgtgtatgacttaaatagctcctgataatcactaaaaacaaagaaatgttagctattatcatcataaagcggtgtttccctaattgtattcacatgatatttgtactttttgccatatctgcaaacccctgtgcttttatttacttatgataaatacttgtattaaagaggaaactttaatcactagactaaatggaaaccagtataacttaacaaaaaaaggagcaaatgacaaaagatacataaagtgaccacaaaacaatgttttcatatctggccagatcctgatgcttgcctaagtcttggagctgagctctggtttctctttgttgggacaagaggttaaaaagtgttagtgggatgttaaaaccttgaacttgaatttgaacttgacactttgagattttcttttttggagcatagaagaaaatttaaaacagccatctttcactttatagttctgtgttttttgttttttgcttgtattgctgcctctatggacctcctaaaagtttctctcatatatctaatgttctgcacctcatgctttagctaaggtgaagttgaaggattcattactatccaggtctgtaatgactgcaaaaaaaaaaaaaaaaaaaatccaggcagtttgatgcatattattcttgaagactgtttctcctctcagccttagttctgttatctatccgtcccatctccaaaattttttttaatggtgtgcttccttcataaatttttcagatctaggtctgcgtttttgtctcctctgaagtccagaaattgatgtctcattgaggaatttgcaatttgctctgggcttcacaatgctgagctgcccacttcctgacttaaggaaaagaccagatgtcagtgtttattagtgtgatcatgcagtttagttgctgtaaggttttattcttaaaagattgcaatctatcctattgcatgatcacccaacattcaatatgctggcaatttccaatatgtaacctccttcaaattaggctcagtgttatctccctcatccatcagtacagcaagatgggtgaaaagtgctgtcgaaaacagctggtcagctgggctagcatttccagggttgtttcatctcaagccctttcactcccacacactttatctttttcttaaaacacagtctctggactatctttgtcctttatcataacttgagtttgttctgttcttccttggtctgaggtcaaagccatcttcctagaaacttctttatatttttggtccaaggctaaggttagggtgatacaaacccagaaatacatctcttatcttttccctgttcaaggcagttgacagttttgcatagtcactcatatttttcatgcaagctttggaaattttccccaagcaaagagactgagatgaaaccaagttttagaatttctgcaggtctagggacgccatcacaaaatggactttggagtctgcttatgctgcagatggaatgaatgaagtagaaagggaaatgatctgcccaaagtgaatccaggatctttgatttccaatccatttaccccagacaacttcaaggtagagaaagtcacatgatatttacatcccctcacagtaccctgtcccatgacccctggtgatctggccatgctggcaagtcatatcaccttattccaagttattatagtcttgtaatctctaactgcaaaggattttagtataccttaagaaatagcaatgggaaccaggtcaggaaataagctcagtgtcaatgataaaggctgaaatgcaggggaaattgatccaatgagagaaatctcagaatcttttttttttttttttttttgagaccagttccggctttgttactcaggcttgagtgcagtgatgcaatcaggctcactgcagccttgacctcccaggatcaggcgatcctcctgcctcagcctccagagtagctgggaccacaggtgtgcaccaccacgcccagctaatgctttaattagcgtgccgtcttacccaaggtagtcttgaacacttgggctcaagctatcctcctgccttggtttctgcgattataggcatgagcctataaaatgctgcgattataggcatgagccactgcacctggccatagagacttgatatgacttataacctatcaaccagtgtattatcttgggcaacctgggggtaggacacagttagtagcaggaactctgcagtctcactaacttggtttgaatctgggctccatcatttattaactctatgaccttaagcaagacttaacttgtccaagccccactttccttgtgtatacaatggagaaagtaatagtaacacttctaaggctgcttgaggattaaatgttataattaggcccatgcctgacacactgaaacactagataaatattgcctgtaattatcatgtgacctatttgaatatccctcaaccctggaaggtttactgcagaatttagtggcctcttacagatatcaaagaattggctatgaaattgtacaaaatgtcgaaacttattctctcctttccaggtgggtgagcaggggagataatgtatccataaaggagcttcttggatgggtggtgtctccaacttctttcggtcacctacctattatgggtgatcctcttcatgaggcatgtccttcttgacccaaaatctgtaaccccaccctttttgttctaattagaaaaacactcatgcattcatttagataaatattcattgaaaacccactatacgccaggtactctgctgtacacggagacatcaattgtaactatgatatgttctcctggcccttacattctagaggagaggggcagagaacaaacacgtaaacaaaaataaacacaaaataatttctaacgcagtgtgaaaggatacaaaccatcgcactgggtctgagaacagtgagagaatcagattggagtgtaagttggatggatggactatgtggacggggtcatcaaggaccccactctgaagaggtgaacttttttgctgacacatgaataatgagaaagaactggcttcagagatctggggaaacagtgtttcagggaaaggcaaaaggatgtttcacatacgagaaggagcttggcttgtttgggaaacagcaagggggatagtactgaggcagggagcgggaggttggcttgctgtgcagaagccagggtgcaggggatcttgtcagctgtctcagagaggaccttgagaagtcactggaggcgggtaaacccaggagtggcagcatcgatttaccctttgagagaacatactgggatgctactgagtgaggaaaacaatagcatagaagagtgtgaaatctagtctccctccttcttaatcaagtaaattgtatattgcagtccttaaaagagattggtcacaaataattttcaacacacctgataactgtgcaaaacttctttttgtctcatttttgagaagtgctctggtaaaatatgaagtgcctctgtgaaggtgtgagcctctgtcccaaaagggcttgtgggagttgttttggagcttatagatgagactctgctttccagctcctgtgaatttcacaatcccaagagtcagtagtgacatagtcccagggtaggtggagaagattagagcctgggaattgtcttcttcctgggcaaacccccaacttaacagatgatgtatagctaactagaccccatctgttctataaaagagaggaagccgcaccctgtcttatagcagcactagaatgtttgaacacagtttggaacagtcccaccaacaaggtcaagaaagaattgaggcaactaattggataattcatcaattagttgaaatcctctgccccaaagattttatgtaaaacaacttgaactgctcttttccccattaaattacaatgactcctcagctcaccactgcgtttttgtggatatgattgtctttacaaaaaatattttattataatatgggtaaagactttttcccttgttttgcccatttataaatgtgtacttttaaaactgttctgtcccaagtataactgctctctttacttattttgtcattaacgtcatcttttttgtttgtttgtaattctaagtccgattattctctgccccatgcctttccaattttgctgtcttattctcccaattgctaaataattagtcaatatggcttcaccatatgtacagagctccacagataagcaattggcctttgacactactcagccagtaagctctcaatgcagaagtttgaattttgaccacatgtccctacttgctggtgaacacctaagaatgtaattagatgactacagtttggttgttcttccttggacaattcattttgcaacttaattcccaggttctcagagacaccaacttctaaacattatacagagcccatcagaggatgacatattcccccacatgatagcatattttttatctttaaaacttaaaaagtaaaataaaataaaaaagtaaaacttcagcacgtttttcctctccagggtttatcttatttacttccctcgtgctgttcagctaattccctgccagggacttattgctgtaactaagccatcacacagaggcatgccaaagacacttgtgaacaaagtgtttatttctcttaacagagccagcaattttcagattttctgaagtgcagcccccagcaaaccctcactacctgttttagtaacttcccacagacgttcacattttcataggttctgtggtattgtttcgtaatgatctttaggagagagggaaaaaaaactgcagcaaatgtcaaaccttaggatgtattcaagaggccttcaagtcactgcagattcaggatctgcaagataactaaagcacttacatctcaatatatggcttttaaggtcagaagtatcataaaatcactcaggacatcttgttctgttcaagttccttttcattttcccgccctaatggtagttgctcaaacttcttgagaaaggcaatttctgatgttcccctggaagagattttcttgacaaaggatttgaagggttagtattttctttctccttcttctctctcctgttttaatctgaaacgtaatatttattatctccaatagataaaatacaacagttattcccccttccccctccatgtcatccttttcttttaaaatgagtagtgtctgcctatgtcaggatgattttggtgagtgaatggatataatttgcctcagatcagcccaacacatcagtcaacatcactaagtggtcaaacactccagtttcaaatatgtttctgagaatctaactgctgaaaccagggagctttgactaaatttctttggaactttggagaggaagcagggaggagaaaaggggtcgcaattggcaatgtgtttcctttttgcccagtggaaggtgttgcatatttgtttatatggatcaaatagcttcaagggtaggaggacttacagacagagtgatttcttttcttttctttctttcttttttattttctttttgaggcagagtctccctctgtcacccaggctggaggctggagtgcagtggcaagatctcggctcactgcaaccttcacgtccccggttcaagcaatcctccctcccacctcagcctcccaagtagcaggtgtgagccactaggcccagctaattttcatatttttagtagagacaaggtttcaccatgttggccaggctggtcttgaactcctgacctcaagtgatcctcccacctcagcctcccaaagtgctgggataaaaggcatgagccactgcgcctagcccccagagtgatttctaaaagggaaaaagaaatacatgttagtaacaaagtgaggtagcagaaagaatatgccactttgaaatcaaggagactgaagttcagattctgtctttctcaatgactgtgtgacctcagacaggccatttaatctctgggttttattttcctcaactgcaaaatgaagatttaaaaatatgtttatctaccctgctcctttgccagggaaattaaacagttgctaatggtattaggatgtagtaaactctctgaatgttggtgtctgcccatcccctaagccgaactaagcctttaatatttatacattagaatacctcaaccaaacgacgtaggagcaagaaggtaaaaggaaaagcatagagaacgacagatacacgtttgcaaaaagcaatacttctgttcagtagataccctcttctccttttattgttacttggttgcttggcaactttaacccgctcatccctaaaagcacagtgccacctgcaacccccaactttcaggtttttaaaaaaggaaccttctattaggagaaaattcaccttcgtggcagcgccatttgacgggagaaaagtatatgtttgaaaaggcaccccagccaacatgaatacatctcgcatttagcactcggagatgagaatatcataatatttaaatcagttttgagaactttccttgaaaaggaaaagtggggggaaaatccactagttgaatacccagggaggccgcggggagtggttaccatagcgatttcgcactggcaagtggtattggggagcagattggcatcgcttaatcctttttatttgtaatttatgtatgttggctcattctctgtgccagtccagatttttctgtttacctgccattccgcttgatatgagtgaggagcgatgatgccaggttgcagccatttcttcaatttgtcaacatcggggttcagaaggacagccgagagtacatgggggtgtcctagcactcggttttgcccgatgttagcaaagcgttgaggaaaattttgtgggaattgctgggagtgagggagaaagccatgaaattctctatgataatccagaaacggattgagacccattttggccttataaatctggatttcatcgaaccttgttagtgaataatttttattctctagtgaatgcaaaagaaaaggagatggaacacttttggtcttatctcatcatcctgtggcaaacatgatccttgaaaataaatattctgttgcctaacctgctaagtaattgtctttctaaccgtgtgtgggtgctgggttcccgggagaatgggtattaacagtgtttctcgaaccctcttcacacttcctcaggattaggccacaggaaaatgtcagtttcactgacaattaaatggagtaagttccttattctcaagaaaggaggaaggagatgaacattttctagacaccttcctttagtctcagtgagccttggactaagaaaggcaagccttcaaaatgggcttcagtagatgtcaactaataaatgttcatttccataaaatttaaatgaaccccgtaaaatctacctcttgctgtgccagagccctatctcattactcaaaatagcagcaatgtaatcattggaaaccacaccctccacggccaaggtggctggtaggaaagaaagtcatagctaatttccacacgcttgcccacaaaggtggtgaaaataagtagctagacctcttccagttctttctgctgtaggccatatctccttccaaccacatgtaccttataaattaataattttcagatgtagcgctgcattttgattaaccaagaggcagagcaaggatttctttttctctcagtacacacaggcaacagtccaaatatctaaatacttaaaaactgcacgtgctctttaagaaaatttcaaaactttagacaccccccaagacagggaccgatttactgctctagatgagttctgcgccctctttgcattttaagtgacctttaagcaatgatgacgtctatcttgttgagacttaattgcttaatcagagaaactgtttttcagttacacaaatatttcctttaaggcccatcttttaagtttaaaaagccttcatttaaatttagacacattgagatattccatattttcatcatcaacagcacaactggaaggtggtttacagaaacactgagataagcagtattcttctatgaacggtatcacagacagcgattacatgaagttttcaagtgattaaaaggcttgcagcctgtgcagatatgctcaaactcccacccatcttgaaatccagtgccctcttgacgtttctgtgagttcccagaaattgtatttttcttaatagggaaggcaatctggggttgtggataagaacttagatgctagaattcgactacctagtttcaattattgtatgtctatggacaagagaagcagcctctctgttcttcagtttccccatctgtgaaatggagaaaataataggtctgtcttataggttcttgagtagattaaaaatgttaaacttttaagcactttgaaccagggctcaccatgttgtaagtacccaatacacatttactgtaattattttttgtttcttcagaattcttttttctcaccttacctttgtagcaattcttttatcacttccctagagttaacccaaggtggacccagccctttcaccttaatcattgaccatccccaaccttcacacatcattcaaacaacagattctttattattattattattattatactttaagttttagggtacatgtgcacaatgtgcaggtaagttacatatgtatacatgtgccatgctggtgtgctgcacccattaactcgtcacttagcattaggtatatctcctaaagctaaccctcccccctccccccaccccacaacagtccccagagtgtgatgttccccttcctgtgtccatgtgttctcattcaaacaacagattcttgtagtaaacttttattggaaggtagaggtgagtacagcaaacaatctaatatttagttttagagctcccggtacttatggcatatggcattgcaccatgacatgccctgcttgtagcatatcgtactgtggggtaattcaaaagtccagtcttggtctaggctgccatgatgcttgtttccttcctcaccattctaccaccccaagaaaaagcaaaacaaacgaacaacaacaacagcaaaaaaagcacctcctccttaattagcagacttataaaattgcctgccccaaacctaaactcagcccacaacttatttcacatagcaaagaactattaatgaagttttttgtttgtttccttgtttgtttgtttgtttgtttgagacacagtctagctctgttgccaggctggaatgcagtggcgcaatcttggctcactgcaacctctgcctcccgggttcaagtgattctcctgcctcagcctcctgagtagctgggattacaggcacgcaccaccacgcccagctaatttttgtattgttagtagagacggggtttcgccatgttagccaaaatggtctcgatctcctgacctcgtgatctgcctgccttggcctcccaaagtgctgggattacaggcatgagccactacacacggccttaatgaactttttttttttttttgagacggagtcttgctctgtcgcccaggctgaagtgcagtggtgcgatctcggcccactgcaagctccgcctcccaggttcacgccattctcctgcctcagcctcccaagtagctgggactgcaggtgccctccaccacgcctgactaatttttttttgtatttttagtagagatggggtttcaccgtgttagccaggatgatctcggtctcctgacctcgtgatctgcctgcctcggcctcccaaagtgctgggattacaggcatgagccaccgcgcctggcccttaatgaactctttaaatgctgaaaacacctcgtggatattattcttttctgcccccatccatctaggtaagaaacaatggaatggatggagctacatttattatgctgtagcccggtagaaggcacagtcagctctggttttggatagccaagtttttttctttcttttttttttcttttctggtacaatggtcattcagcttactaggcagagaagtgcctgcactgggacacgccaagctatatcccagacaagtgaatgactggacttataaaaaacgctccttatacaaatgtctgacaatcacagggtctcttcatttcctgctccaatgagtttggctctggttttaagttggctacaaggaggtgctttgatctcaccttgaacatgcttattttcagtgtctggctctttctgggcaccacggatgtacaatataaaaatgtgtttggctggccgggtgcggtggctcactccggtaatcccagcactttgggaggcctaggcaggtggatcatgaggtcagaatttcgagaccatcctggccaacatggtgaaaccccatctctactaaaaatacaaaaattagccaggcatggcggtgtgcacctgtagtcccagctacctgggaggctgaggcaggagaattgcttgaacccgggaggcggaggctgcagtgagctgagatagtgccactacactccggcctgggcagcagagcaagactctgtgaaaaaaaaaaaaaaaatacgtttggctgcaagtaacagagagcccagccctcactggtctcagaccacagaaactggcttttctcactgaataagaggcatctgctctggtggttctgctcactcatcttggggtctccatggctcttttggcctcatcccttgtgcttgcaccacggtcataccatcatcctttctccgtgagcgtggcaaccgtgtgcaagacaagaggactgggtagagccaccacccagctcatctgctcttcttgccaaaaaagcaaacactttcttggaccacccctccctcttggcaggattccattagcatcttattcaccaaaattgtgtactcagccacacctagatgaaagtgaggctgtgaaaaacgtgtattttgcttctccagcccctacagtagaggaagcacagcagagagaggtgacagtgctggaggtggtgtttgctctagaattagccacccagtagctatagccacccaaaaggaaggaaagtctgagatgtacagatttgaaggggttaggattttgctgctgcgtctcaatgcttatcagctacacaatgctaagagcctgcatgaaacctcgcggaggaaaaaaaaatagttaaatatttaaatgatttgccgacatggggaacttgccattggcagcaaagatttattaagcaggctgcaaaacaagatgtcgttaaacagtttgaaggcacgccctcataattaagaaaggagaagttttctaatttgggtaatgaaatctgtggctcagatgaacatttattttattaatatttatcgtgtgcctactgtgtgccaggcacctcatgaactaatcccattaaacaacagaaaagtttccctaatgccaaatctactggtaataatagctgccattagttggacaccgacatgctaccaagcaatgtgctaagcattttacctaacagtttatcctcacaggaattctaagaagtaggtataattgctgtcaatttatacatagagtgaggaaccaccccaagtttgtccggactgaggcatttcccaggacacaggactttaagtgttaagccagagacgtctcaggcaaagtactgggaaatgaacaaagtgaggctgagtgcgggtaaatgaccaatccagggtcacagaatcggcaggtgacgctcctggaatgcaacgcaatgccacctgttacctgctcctcccaggctgcaacttgattcccaaacctccccttgaacccagaacactgaccacttcccttccctgccacttccatcccaccatctgctcttccaagtacaaaagagctgacccaaacccaaaagagctgaccctctctctgagctatagagctgtcaagaaaaatcctggtccccattggatgggcttgggtggtctttcaggggcaacagcactgcatcatagcagctgtttcgacccttcaccacagaggcctgcatgctccctccagccccttctccaggccattagaacttaattgcctgcagactgtttctcagccctggtcgcacattagtgtcacctggggagcttttgcaacatactgaagccagcaccatccatagcagaatctgtaagagtgggcctggatgtagggctttttttctaactttttaaaaaattcaggttatcttttctgcagccaagttcataaatattagtaaagttcaatggattttacataggttcacacccatttaaccacccgccagatcaaaatatgaactatttccagcccttgggaaattccattatggccacggatatggttttaaacccccagaggtgattctaatgtgatctgggcggctctaaaccagtagaatgaccctggataggtcctttaccccaactcagactcaatcagattggaacgctactggtttagagcccagatcctctgtagccagagaggatgcatttttccaaagatggcagtggctacaaattcctctctcactggacagagaagggagaaaaaaataatcctcagtagtgcatcccgctgtgtttatttgcacatattcttctcccacgacatagtgaacatcttgaaggcagaaactgcatctttccgagagcctgacaaagggcgtttgcatagtaaatatttatcaaatggagaaaaataaagaagaaatagacatgtgtactggggagtcatgtttggtctccagttaggttcctcaagtttctctgagaagacagacagagagcagcattcagtcctttttgcagtctctgctttctttctttgacctcaaaagggcgagttcaggaaaatgttgattctgggtcttgttcttctgtagagttcacacgcggtctgtgcataggtgacaccagtgacttgtagtgtaatcctgccgtgttgaaagctgatgtcaactgctaaatgggggaaagcagggcgtctcgatggtgatgtgtatgtatgtacacgtgcagccggaaaataagcaaaggactcaggaaatggatgttgtaccagcaaaaggccaccgacacttaggaatgatccatgtcgaatgcacgttgagctgccctgggtcaccgggggaggcatttcttttttaatgtataaaacttacaagtttgaaaaatacgtatttagcctggagggcagttaaaaagactttattgtgtcagcatccccagatcatttatacatttttgtgcccacatattttattcataatgtctattttattcttctttattttgtcaacttggtgttcgacattactgtttctcttagaaaacaaccccgttatcggaaccaggccacatgactgtggataaaggcgagagcattgtcgggcaaggttaaaaatcagcacggtgttaagcacctgggagggcttcatggtttgggcttgagtttattgttatatggttcctgaggccttgcatcggggcagcagttggggaagagggctgcggttttaacaatgacagagaactcagggggcaaaagactgaaggccattcaggttcttcacatgaagggaggaccaaggtttgttcgccaacaggcaagacagagcagagtgctcacatcacaccacccccgaaaatggcaaatagagcaagatacaaatcactggcttctcaggaattatctggacagcccaagaggtcttgggaaatgactgccatgagctgagggctcaaaaccttatatttattcaaagaacgactgccctgttgctgtcaggtcacacagattgttgggctacttcaagaagtgtttcttctgaaatcaggttctgggctgaagatgtgagaattttaggatattagctcttgtttctgccctcccaccccacttctataccaaagcatgcaaagcctttcactgaatgcaatgaaaaaagaatttatcaaaaaggaagagaagcaaagagaaaggagaaagaaaagaaagagaagaggaaaagaaaggaaggaaaggaagataaaaggaagaaagagaagaaaccactgtacattagacaagtgttaatgggagagttcaggagaaggagttttacaaataagaagaagacattttattctccagggcaacaagcatgatgtgtatttccagtatatgtcatgtacatctcccaaattagcatgctaccaatggagtgatatcaccatattaatattgctgcttcttcaactgtgtcagcctggcttttgcaacacacgtctgtcagccatgagatgttggatctcagtgcatctaaccttcctgtcattcaaagtcatttgaaagtggaaagagtaggaacccttctgacttggaagggcatttgcagaccttcctttagtgtgctctgtgtaacatgaatcccaaaaccgaggaaacaaaagcaaggagggctcatgatcaaatgagtatggataatgcttttaactccatctcgttattggacattcccagtggaagtgagcaaatgaatagctctgaaagccactgaaataaagaaaattgttgagcatctaacatagtacctcccaactctctctgaccatggaatgttttttctccacctggaattcttttaaacaagtattctaaagaacatgctttgaaataaaagcaagagcccaggagacaggagacctgactaaagactaaattgcctttgcaggtcagctagtccaacgtttcattttagagataagaaaatgaagaaacagaagttgtatggtcagtggagggtcacagaggcagaattagaaccaaatgacccagaacaaatgcatttacctctgtgggcctcagtttccctgtccctattggactagatcagaggatatcaactagtaggccttgaaacagtcttagatgtgtcacctaattctgaataatgcgtgtatttgtagtctgctgctgtgaaactaattaccccaaacttaatggctttaaacaacatgtttattatttcacagtttctgtgcataaggagtccaggcaccagttaggtgagccctctgcatcaggatttcacaagattgcaatccaggctttggccagggctgcagtctcatcagaggtttgactggggaaagacccacttccaagctctcacacatcgatggtaaaattcatttcctttcagctctaggattgagggctctggtttcttgctggctgttgactgatggctaccttcaactcctagaggccatctagtattagacctccaccatgtgggattccccaacatgaccatttacctcatcaaagccagcaagggagaaagagtctctttcaagatggaggtcaccatccagtgcattataattatgaaagtgacatcccataaccttgccgtattctattggttaaaagcaagttacaagtcccacacacactcaaggagaagggactacacaagaaaaacatgcacatcaagaaatggggattataggaccactgtaagagcctggctgccaaaatgtgcaaaatttatttttgctgaaaatgagtataccattacagagatatttggtggggtagaccattgtgctgagatgatcatctgatgtgctgtaaagcaaggtataccttgcaataagctaaaagtaagaattatagcacagagcagaattgcatctcacaaggtgtaaacttctaaaagcagctcataagaggaaaattgcctatagtcaaaattaccattaaaaatcttttaagccattcataaagtacagtgcacttattttgtgtattactacattgtacattaccttgaactgtaattcttatgcagctgaagtttaaaaattattcagccagactgaaggcatgtctatacccagaatctgggcattcaaaccatcctgcctcaatataaacttctaacagtaaagcaaatatggatgaagaatattaaagcatctagcctccagagattatttcattctgttttaaaagtatgcttcagaaaccttataacatgctaataggtttgtttggttggtgagagttaaacaagataaaacacatgaaacaaatcagccctcagcctggcacacacagtgggcagtgaatttttgcagactgtgaacgtgcatcttgatcagacactcagacacacgtacactgccttttgaagagctgcagaaaacaacttggccacatgtgtcctgcttgtccaagatggcattttcctctgtagtttcccagcagtttccactctcatgagcactgtgcccatcttcatgaggagaagattctatagtcaatgccttatttgaatgagcaaacaggacatcttacctgtagtcaggcatggtggctcacacctgtaatcccaacactttgggaggcggaggtgggatgatcacttaaacccaagagtttgagaccagccttggaaacatagggagatattgtctctacaaaaaataaaagattagctgggtatggtggcacatgcctgtagtcctagctactcatgaggctgaggtgggaggatcatttgagcccaggaagttgaggctgcagtgaactatgatcctgccactgcactctagcctgggtgacagagggagatcctggctcagaaaaataaaaatttttttaaaaaaaatcttacctgtaatgatgcaactgcactcacatgacaagcctacagtaagggaagatgcggcggagtgcaataaatatgtctcatagatatataagcacataaggacagggcagtagagcatcctacttagcagggtagcgcagtcaccctgaactcttttacaaatatcaagagacgtggagacattgtaacggaggctgcctggtaactaatcgctaacttgttcagtttgggtgaaatctgccaccagcatgtctgtcttttgacgatatgtcacacacacaccaaaagggtgcaaaaccctgaatggcagtgattgttcccttatctttccttccctaaaaagaattagggttctaagtctggtgtcaaaaattcaaaagcgacaggagccaggcaggtaatgtatatgagaagaggagacaatagagagggaaatggagtaggtgaaatggcaccagtcgctctatctctctaaaagaattcaaatttggagatttttccaagcaccgcgtgggtgagacataacaggcttacagctggattcagccaatgagcacgctgttccgagttcttaattaagggcctgcaggtggcaaggtctgtttatattgtccccaaaatcctagattttaaaaaaggaaaatatgatgaccctgtgtggaaacaaaatagtagattttttgttgatctgaccacactgaattattagagatttggggtgataccacattcattcttgaacttgtagccaaacacctctgagcaaggctaggaggagataagatttttattttcattttctttccatgaaggactgtctctcagcaactctcactactgttatcccatctggttgtaagtgaaatacagatttggaatatcatttttatctgcacatatttaaaatgtaatgtccaaatattatgctgtttgaaaagagacacctgtccaaaaaattcccgggaaggtttcagagagtgcacttaagctcagatttagacacaagtaaagctcatttttcatttagcagaaaccttcagactagccaagacttggaatacatgctgaacattttgcaaatacagcaatgcctcatttatttgacgtggactgttccatgtaaatgcattttccacataactgaagcttatcccattgcacatcaaatcatacatttattttagccattttgcatgggaatatttctgagagtgcattacacacttccctacctccttaaatagaatatgagaaacataatttaatctttgctatctgactcagggtcatagtcatgaatatcaagtattgggctgctttaggctgaaataaagggatgccctggggtccctacagcataaaaggagttgtttgacttcactttgcaggagctgaggtttccacacttttgagagtgtgcctgccagctctccatctcatccttcagtgctctcattatacctaaaagtccttttgttccaaacctctttaaatttgtctcgtctatggaataggaaggtaaagtgaagtgccttacttggctgaccagaaaccctgggttattttcccatttttaatacattcttgtactttgttaacctgcacaagctacttgaccctcttggcctctgttccacaatctagaagtgagagaattaaacacattgtctaaaatccaccgaatctgcttccatttgcataattttatgtgatctttggctctgaaatgaacaaacttgttaaaattgtgcttaaacatagagatcgtgggtcccaagtgagcacttcaacatccctgttagaagcagaattcactggctgtgtattaccttatttgtttattggttccattatattctacattgttgaagctgtcaaagaagtgaccactcgataaattgaaatacgatgctggccaggcacggaggcactttgggaggctgaggtgggcagatcacttgaggtcaggagttcaaaaccagcccggccaacatggtgaaaccccatctctactaaaaatacaaaaatcagtcagatgtggtgatgggtgcctatagtcccaactacttgggaggctgaaacaagagaatcgcttgaacctgggaggcggtggttgcagtgagccaagatcacaccactgcgctccagcctgggcaacagagcaagactctgtctcaaaaaaaaaaaaaagaaagaaagaaatatgatgcagtttcagttatctattgctgtgtaactaatcgaccccaaacctagcagcttcaagcagcaaaggtttgttatttctttgatttctttcattctgtgggtcaggaattcaggcaacattctgaaacagcttggtggggcatgatctggagaagcttccttaatttcatccacctgcaaatgggctgaactaggaggtcaaagaagtcctcagccacatacctggtgctccatgctcctccacctgattgctctccttccaatctccttacgaacagtcttatttcataatgtagtcctagctttttttttttttttttttgagacagagtctcactgtctcccaggctgaagtgtagtggcatgatctcagttcattgccaccttcccctcccgggttcaagttattctcctgcctcagcctctcaagcagcagggattacaggtgcctgccaccacgcctggctaatttttgtatttttagtagaaacagggtctcgccatgttggccaggctggtcttgaactcctgacctcaagtgatcagcctgcctcagcctcccaaagtcctgggattacaggcgtgagccaccacacccggcctagttctagcttttttgcaacatgaaggcaggcttccccaagggaaagcaaaagctgctaagcctttaaaggatatacaagaattgacacaatattacctctgccatgttttattggtcaagtcacaactcaaggagattcaaaaaaaggagatgcagaccctacttcttgatgggtgcagttccacgcatgtgtatgaagaagaggaattagtagctgccatctttggaaatcgctacactcttaagacatcttcacattatactttagaagactaaaggttttctttcaacatcaaaactattaattagttttgatgtgtgtgcctaatcattttcttaagtagtgtagatttggtaaataacacttttcctctgggaaaggaataaaaagacaatccacacttttaattggatccttctcttgaagtgaattccaagtctgtattttctcttgtaaacatacagcaaactttccacgttttgatcctgtacttcatgaatcaaagtgaaatcttgggaaagaaaacattacctctttctgaactttgtgtataggcgtgcttgcctttggttgttgtcaaaattctttgaaagtgtttgcccaacaaaccaaattaaataactgcgatattctatgtgctctcttgtcaaaggaagataggttcctttctcctttaggtttttgtggattcccgttttttgtttgccctgttgttcatttgttcagttacttatgcagattgtctcagcatattctatgtgccaggtttttaaaacaggcagtgaacaagatagacatcacggcgctctcatggagctgatgttctagcatggaaaacagataataaataaataactaatccattataattgcaacgaatgctatgaaggaaaagcagaaagggtagaagctagattttaggggcctacgttggtatgagaaatacacagaggcctcctagaggacgtgatgtttcagctgagctctggaggtgggtgggtgttccataggtgaaagaaccatggaaaaaggagccgaggaggacattccaagcagagggaagaacacataataagaccccttggaagggaatggaagctagtgggttcaaggaagtgataaaatccagtaacagaagccaggatgaagatgtgtgtgatatttaaactaaagtagccatttaaaagttgtgcaaactaaggcatagtactcaaactctttgagtcttggggtaaggaagagaaaggaaaatgatgtcaaccctcagtcatccccactcacaaagaggcacaaacggaaatctcactcatcacttggttcattgttgttgagcttgtaaatgtattgataacttctcctaagtgccaggcattgtattacatgctgggagcacaaagatgaataataacaataggttcacagaaaagatgaattgattgagagaaaaagaaccctccaggagccctcagcgtagtagggggttggtgttggagggtggaggaatggaaaaggccctgaaatgcaggcagagaaatgatgaaacaattcaggggctgtggtgaggttaaatgaatatctttacagcagcctcgaagactgatcaggttactataccctctcttctgtccacgtgcatttcaaaatagtattttatgtttaaaaatgacaaaaaaaaaaaaggatgtacactggaaataaaagaactttctaggttttttgtgaaatatgtaattttgggtaagttcatcaaagctgaactcattttgttactcatttacttatttatgtagagattttgggtgagtcatgctctcactgcaaagttaagtagttgctacaggacccgtatcacccacaaggctgacactatttactatctggcactttgcagaaaaaggttgccaatccctgcttttttggtgcattcatccttttcataaggagaaattgctccaggtaaaagtcatcacaataaatggtttcttttatttttttttaataacaccctgtttcaatgagctgcctacaatcccaccattaatgcttcagtgttttggcttaatgctggcttcaagtagttcttttcaagaagcaaatacccctgagagcagtagctcattatttagctaataacagtgtgagaaagcagtgtggtgtttagcaaaaggcagtggtccaaggaaaaggccaccaatattcccaaatgcaacaatgtctagttttccagtctgatttcccagagtgaaagaagctcgtgtagtccaggccacaggaccaaaaggctcctgccaggctgaactccctagtcttgggcaaaatatgctggggacttacttatcctatttgctggatcccaaagaatcaaagataaggattagaatggttgagttcacacagagaattgttgattatgttttatccttttaaatatgtgtaagtcatagaaagctctgcagtcaaaaatattgattgcattgatctctgccaaccacagaagcatggggctcatgtgggctgcagtggaaaggctgtgaaatacttaaaataaagacgttatctgatggaagatgctttcctcctcctctcccccaccccagaagcaagtttgaactgaaaatgcacaaatgccagtcagcaaaaggaaaaagtacttttgcagctccatttaaacatcagcatgcaggcctcgagtccagcagcacgttccagggcagcaagaatacaaatttctgcagcatgcatggattttacaagaagagtgtcggcgtgaattgtattacaaggcctgatgagcaatgttggttttcttacagagagcagcccctttatcattcaaaggacattgccgatcaaaaaccctctttttgcacacacagcccatgttctggagcaaagtatttacgcatcattcccttactcggttaatcagccctctgttctgcagggtggagtccctactttgggtcagcccctgtgctgaatgttggcaacaatgtctatggcctcaacaagtctgtgaggaaagatggacatcaatttgaaggttctttggtggcaaaaattttcatcttgttggtcattctaagagcacaaggccagacatgtagtaggggttcagccagtatgtgttaaacaaatgactagatgaacaggtcgaatgtaatacaaggaagagaaaataagcttggatcagaaaaataaacaactaacagccagggaggctgggaagcctccagagaccaggtgagatttgatgtgggccttgaagaatgcctaaaagttcaggaggtagagagagaaaagggcatcttagaaagatccttctggtaggagagggcaaaggatgggttttcccaacccctttctggaaacaggcactttataaatcaatacagctaaggctccccataaatgcacccaaaccttccagaattccacgcggaaacactccccaaaggcattcagaatgcaccagagcttcatcctgctgccttttgcatgatttctcagggcctggcaattaagacaattgtttcatcttgtgtgatgatgtgaagaggatccaaggagtggcagcatatcactcccaaactagcttaggacagggcaagcaggtacagcacaaatgttgcacagaattttccaggtggagggacagaggaagatagaaaaagttggcatcgtgggcaggaacacaatgtagcttccctgggagaagaagggacagttgctaggctcaattctgctcagcctttactgaaccccaccaggctgggcaccatgcttggcaaagggcataaaacaaggaagtcagcagagggggcagcttggtacagttagtgagaacataggctttggaggtaaatattctgtatcaacccattttcatactgctttgaagaaatacccaagactggataatttataaagaaaaagaggtttaatggactcacagttccacatggctggaaaggcctcaaaatcatggagaaaggcaaaggaggagcaaaggcacatcttacatggcagcaggcaagagagagtgtgcaggaaactgccctttataaaaccttcagatctcatgagacttactcactaccatgagaatagcacgggcaaggctctcccccatgatttaattacctctcaccaggtccctcccatgacatgtgcaaattatgggagctacaattcaagatgagatttgggtggggacacggccaaaccatatcatatgcattcactcatttcgttcagctaatatttattgatcacctgttatgctgtaggcactgagtacagttgtaaaaaagccaagtataagtgctgctcttgtagaatttatgttccaggagagaaatgcaataaatattagtgcttactacaggccaggcattatctccagtactttgtatatgcattaaatgttactcacaagaaacctttaagttactatgacactcccattttacagatgaggaaactgagtttcagagagtttaaacaagagttagaacacagatacaaggattggccttcagagtctggccgttaaccactaggttgtcccatcacaggacagagagtggacagggtttgggaaagggacagaatgacccaggaagccccctctgagcagtgacatttgggctgtacccaaatgagaaagagccagccatggctagagtttcatgacaaggctgagagtggaatggagcaaagcagaggggacggctgtccggatctcatgtgggctctgtcacttactgcttcatgcacttaagctatttaacttctctgagtctcagtttagtcatctaaaaaatggggacaaaatctttaagagaatgaatgcaatgcactcacccaaagcctagagcggagcaagcactcaacacatgtggccattattcctgttaacaggacaattgcttctctgcagaatgtcacagctgagagagagactgattattactctacagtgtggctagataccaaatgtttctcatttcccggactcactgacattctgggtgtggtgcacttctagcatttgctttcccttcttcatgagaaagcccaatcaccctttctgggccatcaacctaaacctcaatggccaagcatctttctgagcctatgcactaccatcatcatcactgccaacactgccatcatcatcattatcatcgttacggtcattatcttcattgtgaacctcagcaaagcacgtactgtgtgccaggctttgtcctgagtgcttgacccttgttctcattcactcatcatagtggcttctaaggttggtgtattattttccctgttttttcaaatgaggaaactgaggcatagggaggttgagtaacttgcccacagtcacacagctaggaggtgcatctgaactgaggcagtctggatctgctggtcctgtctagaaacactatgtttcccatcttcaggatttttgcctctgggcaatattttcctgccactatttgcatcagttcttttcattgcctcaattcacacttttacttaaatgaacactttgtaaaaccacatcctagatgaaaatcagtcatatttgtcattaaaaagggagcactataacaatgaaaatgcaataacaagaaaactgtagcatcaaaatcctttctagaagtgttgctggtagaaggctcagagcccacggccagctctttctttgcagaaaggggagataacaagtgttagggggtgttaaaaacacatcagcacaaagctcaccctttgactcaacagaaaaaataaaaaagaattaaaaaaggaattgtcctactcaactacctgtcttcctccagcattccctcccactttgggagagactgaagtagaaggggtttggggcctgtggtcgggggacatgtctgtaacaagctgtgtgtgcttaagcaagaccttgtgcctcctctgagtgatgaagacatcgttccagtttagggtcatcatcatcaagaagcaattagctggccagtgcccatgtacgataaacttttctctagacaaattagaaacataagtcccagtagaaatgagatttccataaagttacttttagtgaatttaatagactctttcttggtctgaaattcacccaacaacatgcattccacaatttttgtggagcaaccacaatacaccatcactctagggcgcaacaggttttcaataatgaaattgttccttcttactttagaaaaatgaaaatatcctccatttttattacacaatgttcatagtaattcatctttcttcttttgtgtgtccatctttagcaaaattaaagtttggtcccttatatcattccttcatattttttttctggaaatttcgctggtctgtctcttatatccccaaatctgagaactcctggactaagtgggtccctctgggctcaagtatgttggcatccatttgtgtgatgctttatagaaattccttgtcaggtgcggtggctcacgcctgtaatcccagcactttgggcagccgaagcaggcggatcacgaggtcaggagttcaagaccagcctagccaacatagtgaaaccccatctctactaaaaatacaaaaattagccaggcatggtggcacatgcctgtaatcccagctacttgggaggctgaggcaggagaatcacttgaacccgggaggcggaggttgtggtgagcagagatcataccactgcactccagcctgggcaacagggcgagactccatctcaaaaaaaaaaaaaaaaagaaagacattcctaagccagcagatgacaaattgagtgaagggaggtggagacaccaagcaaattgaagtctgatgcctcatctaaaggagtggctgcttctcacctctggggaattgttgtcatggacagtgtggacccggtgatgcctgatctcatgtggtctcaagagaaggcacaagcctgattttcatggggagtccctgtgagctggatctggtggatgtgccacaagagggccgccatcccctgctttttttcattaactggcttaagtcatgtcacagagacaggtggtaaaaggaggcagcagggatgtcatggagaaagcttggactttgggccggtggatctcagcaccttgccattcatagctgggtgaccttgggcagaaaggacaacctctctgggactctattttcctatctgtaaatcagagatttttattctacttcctcaattttattcgagatcagaaataacatctagtgttacaaggcagaggacagtgattttattttgtaagtaaaagacttgagtctgagccaggcacctgtaatcctagcactttgggacgccaaggcgggtggatcacttgaggtcaagagttcaagaccagcctggccaacagggcaaaaccccatctctaccaaaaatagaaaaattagctaggcgtggtggcaggcgcctgtaatcccagctactcaggaggctgaagcaggagaattgcttgaactcaagaggtggaggttgcaatgagccaagatggcaccaccacattccagcctgggcaacagagcaagaccctgtctcaaaaaaaaaaaagaaaaaaaaaacatgactttagtcccgctcttctgttctcattccccatgatcatttctgggtgccactggctgacctttttctagctttctgcctcctcttgagccagtgacaaagcccctgaccagtgactatccaaggctttccaagcccaagctgccactggggagggccctgatgcaaatgcagggagctgggccttgtgtttctaggcctggctcctcttgagcccagaattcagtataaagccatcttcttggcaagaaggcaaacacccacgtaaaacgctagcctacaggaaatcatgactgcctcctgcccaccacggaagtaaaacatcaccctgttctcttcctggagcctctgtgtttggtgctcatggaaaccagtatctttggggctgtgagtgaataagctcaactcttagcagatttgcctccagggtgggttgtagaagaaggtaaccagccttcccagtttatctgggactaagggacttactgagatgccagacttttctgtttaaagccacaaaagtcccaagcaaatgggacaagtcggtcaccctgctccagatcttgatatggaaaaagcatgttggcctgggagaagattctttccagctctaaaatgtcagtgctgtgagtccaggtgtgttcttggaccccaagccactccttggggctgaggcacctatctgagctgctaagccagtgcctgagagccagaggctggcacacatctgccaaaacagacagtactccgggtgactcttataaaatgaccttccttggttcacaaggtgacatcgatttgctatcttggcttgagtctctaccttctaccgtgtgaagtctgtagaaagtgccctggaaatacttgtttgatgaatgaatgaatgaatgatgtagttaaagtttaaagttttaatggaaaaagaaataggtgaataaataaataagtgaaaggatgacttggtttcagttctaaggattctttcttcccatcaaagccacccgttttcattgccttggagggcttttttttttttttttttttttttttttttttgacagagtcatgctctgtcatccaggctggagtgctgtggtgcaatctctggtcactgcaacctccgactcccaggttcaagcgattatcttgcctcaccctcctgagtagctgggattacaggcgcacaccaccacacccagctaatttttttgtctttttagtagagacaggttttcaccatgttggccaggctggtctcaaactcctaaccttaggtgatccacccgccccggcctcccaaagtgctgggattataggcctgagccaccatgcccgggctcctcggagggctttattacatcctcttgatcacatcatttaagaccaactgacttggagtaaatcctgggctacaggggcagacgggtagggcaagtcctggctcttgtggtccctcctgacctctctggacgccctgttcatctgtacacagagctgcaggggaacttcccagtctccttcactaacatgcgacggccatccctcaaactgggctcctgtcactcccttccacagcaaacattttctttttagctccggcgtttttgagagaatgcctccactcacaggaatggttccagtggcgggatgctcgggtcctaagatagagatatatgagtgaggtttttgtgtctcggaatcatcagagagcaggcagccatctccactgggcacagcactcatggtccaacagcaggcgggtccagtgtagaagccctaggtaggatgagggagaaggaggcagtttccttttctactttttgtttttggttttgttttgttttgctttgttttttgagacaaggtgttactctatcacccaggctggagtacagtgatgcaataggagctcactgcaggctcaaactcctgggctcaagcaatcctcccaactcagcctccccagtagcagggagcacaggtatgcatcactatgtctaactctttggtattttttgcagagatggggtttcaccgtgttgcttaggctggtctcgaactcttgagctcaagtgatccacccacctcagcctcccaaagtgctggacagattccttttcatcctcaaagcctctgatcacatcacctcctccgtgaagaccttgctgacctcaggaagagctagtagctctttctcctgtaatcctgtggcactttgcccatctgctatgattttgatgcattacaaaatgtattgcccctactattctcctctattagatcaagagcacccgggatcaggaattgtgtgcccaggcttcaaccctgtgtcgggacagccagttttgtgctcaacaaaattggctagttatatttgtaagctaacaaatagccaaagtaataataaacagagtgacaacagtcaatgcaggtctagccaccgccaaatgcatgaatctggcagaattcctgaggcctaattatcagggaaaagacttggcaagtggcatggaataatccagaagcagtgtttggtcttggttaaactgtcttacgaacacagggactgtgaaaatggagatccatgtttttccaccagaagcattttatttttctatgtttttcttggttttttgattcttatgttgtcatttccctgagttgagatctccagcagttcctgaattttcttggagcactgctctgtgcaatttcacctgacctccttacatctctgaggggagggcttgatttaactagggtattgatttaacagggactttccctgaaaatctagatctaaaaagtcatcatcttaatcattagtaaagaggaaggtggagaggcagtgatgggttgagagccctggggaagaagctgcatgtgtggacattgaagcaggcctgggagagcagctggccgttgcgtgtggacaccactgccttccagtgaaacacagggcagttcagctcagggagagtcactcctcccctgggcgggacttcagtgatgggccaggagtgtccacacctgggttcctgccatgaactgccttctagaagctctccttaaggtctacacatcgtataatggaggcaagttgctgcatgagggggaactgctttgtttgttgtttgtttgtttgtttgtttgtttttaactgtgtgaagtttttgtaccaatggaaataggaggaagtaaagcaaattaaggccctcccggctactttagtatcttttttttgttttgttttgttttttgagatggagtctcacactgtctcccgggctggagtgcagtggcacgatctcggctcactgcaaactccgcctcccaggttcaagcgattctcctgccccagcctcccaagtagctgggattacaggcatctgccaccacgcccagctaattttttgtatttttagttgagacaggattttaccatgttggctaggctggtatcaaacttctgacctcgtgattcccccctcctcagcctcccaaagtgctgggactacaggcctgagccaccgcgccccacccaaccttggtatcttaaagcaagtgtcttacacctgcaccacccctgctgcctctttctcggctttatgctttgagaatgggagagaggactgtgcttgtcacaagagaatgcattgctaatggtggaattttagatattagaggaacaatgacttttgtcggatttgtccccatccattcacatcagcaaatattccatgattgcctgtgatatgtctaagcaaaggaacttggagtgctgagcaaaggaagacaagacagggacttctatcctggttgagttgcactattaatagataagacatctcaggccatagatagttaagatctcagtatttacaaacttatcacttgtaatttagtctattcctcagcaacgcccatgatagaggtgcagtaacttatcttttagctgtacatgaatttgatttgagctgcaatattaatgggaaggggtgattcaattggtcactaagcgcctctagaaagcccccccggcaaccacctcccaataaggctttgcctccctccatgcatcactgtgtgcgccatcatgctgatgatgtggtataactgtttggtagtggagatgtgccatcgttggaggaggaaatattattagtaagagctgaaatatcttattgcagaaaggtatttataggaaatgtgtgactcttgaagaaagtaagaattaggagaaacccaggagcctatatcagcaaacctctgttcacaattttagtaatctgggaaaatcttacactacctgccttgcaaactggcgaaaattagcaggtctacaattatgatgatcggattctccgagatgaaaattaggtcccgtgatacataagttcagatgtccctggaaagatccaaggaggaaatatttgaaatagagcttgttctggaaaatatttgaaattgagaaggttgtggaaaccgtacatgcagcactgtgcatgcagcaggatgtgtataaagtctgatgaggacatagatgagagtgcttgtgagcccacattctcaaaccacaccaagtacacagcccctgatagcgagaccaagcttgaccatccacatttgttcattctgttgggtagaatttatcaaaccagaacatacaggtcacaagttgttccttcaatcaaggaagatcccctcgtcatctggacactagctgtgggatgtcaaagagttctcaggcccctgagtaactaatgacgtacagccattaactctattatttactagaaatgacagatgcgtggtggcgggtgcctgtagtcccagctactcgggaggctgaggcaggagaatggcatgaacccgggaggcgtagattgcagtgagccaaaatggcgccattgcactccagcttgggcgacagagcaagacgtctcaaaaaaagaaaaaagaaatgacaaatgcattggtccaaaacctacagtgcttcctggaagaccttccaagtgatgtaacaagggttatcttccagagatgcgatattagtcctgtgattgcctgtttactcattcattgatacaataaatattgaccgagtgcttgctatgtgacaagcactgagctagggctgggaaatcatcagtgaatagtcagagaaagtccttgtttgcaagagcatagactctagttcgaggagagaaaatgaacaagaccacttcagggtacgataagagctttgaaggcatcaaaacaggctagggagcctgggtggaaactagtgtaaagaggatgacaaggaagtcctgaccaatgtgagacctgtgcagtgaggagtcagccacacggagagcagcaagggccagcagcccaaggcgagagtgcactttgcatttgaggaacagaaaggtttcgtgactgcagacttgtgaatttggaagcaagtgggaagaggccaaccagggcctgacccttggtaaagatatgcaaagtgaagccttgggagtcatttaaagcagggggctgggatgtgtgctggttatacattgagggacgataaacctgacaatggtgctcacccttagagtccaacacactcttccatcatgaccagtaggaggaaatgtgtgccgagattgctaaatttccaagattgcatgtaactcccagcatgcttcatctgtgctgtattttataaaatatctgcataaacagaaatatttgaaatagagcctattctggaaaatactggaaattgagaaggtcgtggaaatcgtacatgcagcactgtgcaagcagcaggatatgtataaatccaactctgtttgtaagtagttggaatctcagcatttacagacttatcatttgtaatttggactctttattcctgagctactcacattatagaggcatagtaatttgtcctctctgcaatgctgatcagaaacagtgatgtgaaccgtccggaacatctgtgcactagccaataaatgattgaatattgataagccattgataattgattattcaacatacagaatcagtagcaaagcattttcttgtctaatttgatgaggaattagcatctttctattctaatcataagagcattaaaaattatattgttcctttttcccagtggttgccaggaagctcatatacgaagtgaatggttaatcacagtagccattctaatttttatcattaagatatttgctttatcctcctttttaagctttttttatttatttccattatatatcaccttaaatctttttgtagctaaaggtggaatatcaatttttttaattgcatgtttaaagccataaccctggcctgcttgatagatactttagaaatgttatatccaccagtggcagggtgtgaatagttaattgaatcagcaattaaatacatcattatagataatttctagaaaatgttaagcttcaggactttagccaagaatgtatcacccaggcaagtaacatttctactagaaaatcaggttctaccataaattcaaggtctgactattgccatcggaagggtttcaagcttaatataaaccaggaatgtttctcatcactcgaatgcatttgccaaagaacttcaacttctgtctcctttcctgttgaactttaaaaaccggagaggcaactgtctgtcgagactgttttgtctagagcagggctggaggcaggaatccagcattataagtttcaattcttggtcctcaactcaaagctttgggaagcaccttcattgtaccctgttaatcacaaaattaacttaaaactaaaagagtctgtcttctctttgcttcctacaaagcaggatgtatgggggcggtgattatacacagaccccaggactgtatttctgtgatctagcatcgaaaaccatttatggctgaatttaactccggaaagccctgctttctcttttcttctgatcctccatatcaatatcagtctgatgactctggcatttactggcacagctgaccgtaaacacactgcagccattaaccagaaatcacccacatgtgggatttggtcataaacatgggccttgcgtctagactaattatatggataatggttgtggggggcgggggagggcgtaaaaagaggaagaatgccaaaatctggaagatattctaggtagttttccgtaacttttctaaaaacaaagaaatcagctaaaaacagcaagcactttattttttaataatataactaataggcatccactggaggaaaagaaagagaaagagagagagagagagacagggaggacagagccaggccaatgttaatttgtatcactaacattttgggacactttaaggtttactacaaaaattctagatcagggttgatacactgaaaccctcaggccaaatccaacccactgcctgttttataaataaagttttattggaacacagccatgtccatttgtttacatgttatctatggctaatttcacgatacaatggcagagttacagagaccatatggtatgcaaagcctaaaatatttctttattatctgcccctttccagaataagtttgccagctcctgatctagacttttttgtctctacatatttatcttttacatagtctttcaactttttttttaaccttttggcttgaaataattatagattcataagaagtgcaaggaaatgtaagaagaagcccagtgcaccctttccgaagcttcccccagtgcttgcataactatagggcaataacaaagccaaagctagttcagatttcaccagttcacctgccatcatttgaggtgatatgtaggctttttaaacataaaaggggtatgaaatacaatgcctttaacgttaagagtgataataatgagaagccttcaattgacagactgaagagaaagaaacgtgaatacggttagtgcagcctgagaatctcctaagagtccgatatgatccaacagtcctaagaaaaccagaactatttcctctgtaccagtagtcactcctaagtcataacagccaggacatttaggtggagattgtatgttttattttctcctaaacttataatcctctctactttccttcttctgcatccccatcatcttgacactaaaaaaagaaaaagaaagacagaaaatgtgtgcatgaaatgtgaccagggaatcaaagatgacagagctttgataaggtccagaaagtctcagcccctccaaagcaagcgattaaagagaaaggtgacgttcggtttattcaaatatgtttatctgacatctgtctgggtttcatctgaagtgtgtaggctccttctggatccttccccacaagagcctggcttcagtatcatacactttgcgtgggatgaagttctcaagcctcaacagctaaggaaatctgccagggtgtctggcaaactgtgtaagagggagaaacaccccagctctgaattcagcctgctgtgaattatattataaccaactggttataatatatggacagagttaccaggtgtctatgcgggatttggatgtactaatgtttgcttgtgttgagtgaggctgggctaatgagcctcggttacaggtgtttgggagaagtatgaatacagttggtagggcatagtgataaagctttgctctgttttgtttttaacaaaggctacttaagaagctggaattataaagcattgtggtctgagaaatttatagggcagcttgaacggaaggtagtaactaaccagggagaagccacggaaagctctgaatcctctcctggacaccagagggtgtgccagaaaagcaggcaaaaaccgaggtgcttggttcttcttccgggacctggtgggggccaggagatttaatgtgagggagcacagccgggccagggggaaccaaaatcctgataccaggtggcaccgccaaccatgcacgacctctgaggggagaggggagagggccaacaggaaagccaggcaggagccagaagaatgaggagcacaaaagagccaggcgtagagaatggacagtaggtgtcagaccctggtgtgtgtgggagaagtgaccaccatggctcaacggaagtcagtccctcagccagatgatgaatattcactgaattcctgctgcattagtcagagtcccctaaggagacagatggcaaactcagattaggaaaagggttatgacaagcagaatgttttcctgggtggagtcggggcatgtgagagaaccacagggacagggcaggaaccccttcctggtggcggcagagctcttgacacctctgggcttgatgggccaaggggaatggatgatgtttggaatctgcaaatagaaagtcatttggagagaagggacagtgactctcggtcaggggttggaacaagcttgagggaagtgtgcagggatggagccaggaggacagagactccatcttcactgccctcctctggggtcccattcactgaatacatctgaagccagagggcaaggaggcctcctgtgcagaaggcagggtggggaagggcagatgaactggagcgcaccccactgaagattctggcatggctaccacatgccaggcactgtgctgagcctgggactcaccctgccgaagcctgaaggcaaaacaaatcatcatgactgagctaaagccatgaagaggccccagtgctctggaatcacctaacaaaaacagctcctagcctagtcttggaggtccagaaagatgcctctaaggcttgggcattagctatggaaagaacaaagaagaatgtcaaaggcaaaggcaacagcatgttcaaaggtcctggggtgcaacacagcatgtttcaagtcagaggggaaaaggcaagaagaatgaaaaagacgatggcagaacacagggcctgatcacacgaggccctgtggctttttaaggaattcacacatgatcctgtgggggatgaggagaacccaaagtattttaaatgcagaatggattttaaagggtttgtgtgtgtatgtgcacatacatgcaggcacgcatgtgtttggagtggtgtgtgaagctgaaagccaaatggaatgacgaggcgaaactggagatgtctaagaagcccgagtgtgctaagctagttcaggctagattcaggaggaatcagcttgtgtaccaactttttccttttcttgtgtagtttgcactgagagatctttagctgcaagatgagaaggcgcagagacctgatgcctattttcaaatcctggcagatgcattataagaaagggggactcaatttgttttgtacagactgttccttcaagaacactggcatgcaaaacctactgcatctggtgccagcccagccactaccacctcttcttttactccttctgacaggccgagatccttccttctttcagctcctgcattaactacactggtgtgtgtgattctctctcccagatcttcctggggctgcctccttctcagaactcagatctcaactcagaaggtatctccctcttctatcccataagctccatgacatcaagcatgtcatttgtcctgctcactcttatattaccctcagtatctagaaaagagacacctatgttgtggattctcattattttgttgattgaacaaatatttatttagagctttgcaaaatctgattaaactacctaggaaatactgagtttcctaaacttggaggtaaagaagtagggacaagttggttagagagagcattgagttataaaagaggctagatcgcagattgaaaacacaattagaggcctttgaagaacaatctattaagcagattttgaagtggagagaaggagatgtcctggttgaatgggagttgggaggcccagagcactcctccagatctctctgccaagcatggtttctttttttttttttttagatggagtctcgctctgtcacccaggctggagtgcagtggcacgatctcagctcactgcaagctccgcctcccgggttcacgccattatcctgcctcagcctcccaagtagctgggactataggcacccaccaccacgcctggctaatttttttgtatttttagtagagacggggtttcaccatgttagccaggatggtctcgatctcctgacctcatgatccacccgccttggcctcccaaagtgctgggattacaggcgtgagccactgcgcccggcctgccaagcgtggtttcaaacccttgagctacatagctcttatgtttccttcctcctaggatgcagcgactgcatctctagcatgggcaggaaggtgactcttgcatctccacttggtaacagacaaaagcctgcatctcaagggccagatcactgggagacaaatctctaggctggagacttcaaaatggcagtctagataattcagaccacagattggtgcacatgatatttgcaatgttctggaattagtggccaaagtctgttgactacatgcagatattcccacacatcagaacatctgttcatcctgggcccacattctctcattcttccatgtattcattcattgtgttgatataatggagagcaaagtagacaccaatgttgccctaaggagcttgtgttctaagggtaagacacagataaaaagtaagtcatggaatgtatcagatagtaagccctgagaaaaataaagagagaaaaaaacaacagctcgtgggagggggttaggggaggtcaagggatacagtgtttcccaggatggttggagagggcctcactgtgaaaggagtcatctgagctaaggtctgaggaggtgaaagtgaaagccacacagacattggggaaggagcattctaagtgggggaacagcaagtgcacaggccctgaggtgggagcatgcctggtatgttctaaatgggggaaccctaagggggtctgcatggctgaagcaggatgggggaggcagggcactgcggtcaaagagaaaatgtggggagtgaagggtccgaccggcaattgcacttccagtgtgcggccaaggggagaagcactgatttggggccttgtagagatagtataaagaacttgccttctactaagtgaaatggattttgaacagaggagtgacgtggatttactttttttttttctaatttaaaaaaaatttttttttgaggcagagtctcgctctgtcgcccaggctggagtgcagtggcgcactgcaacctccgcctcctgggttcaagcgattctcttgcctcagcctcccgagtggctgggactacaggcatgcaccaccacgcctggctaatttttgtatttttagtagagactgggtttcaccatattagccaggctggtctcgaactcctgaccttatgatccaccagcctcggcctctcaaagggctgggattacaggtgtgagccaccacgcccagccagatgtactatttttaaagaatcctgtgttgagaataaactatgagtaggcacgagtatttgcccagaggccagttaggaggctgttgcaataacccaggtgagagacgaccatgccttggaccagtggttctcaaaacggggttcttaagcaagcagcgtcagcatcgcctggacagttttcttaaagcaaactttttggcctcaccagagacctactaaaccagaaactctgaggatggagccagcaacctgtgttcaaatcaagccttgagttggttctgatgcacagtgagatttgagatccaccactgccttggacaaagatggtcatcatggaagtggtgaaagggcttggttctgtatgttttaaaggtagacttggacaatagggaaaggctaaatagactgggtccctaaagacaggatcagacttctccagtttgccactggccccactcagtcctttctgttcctctctggaccctgtaggcatttgtctttgccctctgccccagactcctggatgagagaggtagaaaactcaatggtgggaatcccacaaacttctgttaggaaaattgccttgggtcatttccttttgcatatcggaagaatcatctcaatcattcgtttgcaagtgtgacaagggaaaagtgaaatgtctgtactgaggctttggggaagggtgagaagggtgttgaggaagggaaggaacaaatgagctcatggtttcctttttccaatctggctctcctttcccagagggaatactcagggaacctgctgttacttctcacaagcactagaaaaaaatcacttcccaacctcatctgccaggcggcaaaatcttagctgtgaactgcagttccaaaatgtgactcttattaaacatcgctatcacattaagcccagacagtgacctactctgtcgcctgaaagaatccgcaattaacatggggagtctaatcaggatattaacgagtctggttttgaattcctataatattttcatcagttttttaaaaaactcatttcaacctgcattaagcttggcaagtggattctgtggggtgaaaagcgacaggatttgggaaagcttatattttctcatcaggtaaaatgcaagcatatggaagattcagtttgttttaaaagaaaccttcattaagaaatgaaaggttgagcctgtgaccactttgttacagggtggctgagctgcaggagagaaggtgagggcatcaggaagagaaagtacactgccaagaaaggctgagaaattctaccacgtctcctttccaggactggttatttcatagcttcacgcccagggaaatcacacatgcaaatcggacactccaaaatacacagcagattaaatcaagtcaatatttggtctgtagctagtatattttattaaacctaagaagctgcagattataagatgtgtcattatttaggaccctttccatgaataaaacaaaaagaagaatgccctgaattcattgtaagatctcattgattggaagatgcattctgattttagtgatattaagatgtctgaggatggagcatccaagctggtgggtaagcacagtgaggccaacacacacccatgttctttccacctctttctgctccgtcagccttagcttccatgtcttgttcttgtgtctgtgttacgatggtagatacaacttcatgcctcacgtgcactgtgcaagaggaaggagagtgtaatcagccaggactttaacagagaaggcacaggaccagttgaagatatcttctcgctttctctctatatatatgcatatgtatataatgtattatatatatgaatagatgtgtgcatatacgtatatgtgtgtatacatacacacactcatacattccacacttgagtaaatacatacaagtgcatatgcatatttatataatgtattatatatatgaatagatgtgtgcatatacctatatatgtgtatacatacactcatacattccacacttgagtaaatacatacaagtgtgtatacatatatacagaaagcaagagagagaatgagatttatactgttgtgcagcatggctgggcaaggctgacacctgcagggctggccagcaaggtggaagctcacagataggagctgaacttgtcaatccacaggcagaatgtcttcctcaggaaaagctccgtttgggccttattcaacggattgaattctccctgcatgcattgttgaagataatctcctttgcttaaagtcaatttcttatggactttcatcacatctagaaaacacgttcacagcaacacctagataattactggttgaatactgtgggactgttgccttgccatgttgacacataaaaccaaccatcacaaagggtgccatgatttttttaaaaagtcccttctaacaaggttttgcctttttcattagagaaggacccattctctgtatgtttcattggacggaactgtcacatgaccacccctggttaccacagaggctggagctggagtatgttgttcctcagccactctaggagggatatacccagggatgtcagctgtgagtggatgctgagtgagccaatccataggatcttccatgacctagttactgaacatctaatgagtacaagaggctgaacaaccacgtgtggctcagattcgattcttgttaatcattaccaaagataattaaataacattgactcccaacgtgaaaaactcatttcccttccatgcgtggcagctgaaactgctttttgatgtagagtagggctataaaatgccttttaaagtgtttaagctaaaatggaaaccctgttaaagaaaaatatttagaaagtgccttggtactaattgtacgctagagcagacattgggaaactgtcatgtgagttgcttagtcatgaatcactgattggaatatggttcttcagtgcttcccctggctaaagcacaggctcaaagctatgttgtccatgtccctggccaggcagcatgagacgtgttcatgaggaagttagaaaacctctctgaccctccatctcctcacctgcagagcagggacacaccatagtgtgtccatgaagtcaaacgtggtcctgcaaactctttgcaaggtgctggcctgtcgcaggcattcaccagccatgaggttattgttactattccacctcataatttatctgagcagagagaatgtcttcataattctttccacataaaattgaagggttttagtataaaaagagtgatgggctgggttggaggaggatttaaccctgccaaaccatcatgctctctatctaacgtgggatggtgagaacaatggaaacatcggtgaagcccattcgcctctccaaggagggtctcctatgatgactgcctgggtcctccctactagaaaaagtaacacaattagtattctctcttccaaaaggagtaattcaggcactttatgattaaataacttgtcccaggtcaaacaagtagtaactgcccacactaacttgaaatcgacaaggtgactttgccttctaggggacagttgacaatgcctagagacatggttgatcatgacttggagggctggggtggtactggcatctggcagatagacaccagggaagctgtggaatgtcctacagtgcctgggacagcccaccccctacaagaaaggagcacccagctccaaatgttaagagtactcagctctaaatgtcaggagtactcagctccaaatgtcaggagtactcagctccaaatgtcaggagtactcagctccaaatgtcaggagtactgagggcgagaagtcctgctccagagtccctgtgagcctttcctcacaggttttcatgagggtcagatgaggccagcactgcgtcagcgttctgtaaacctcaggcaggagccaggcatgcattgcagtgatgggaagcactgatgaagccttcttagcaaagcacagacgtgttggccaatgcatacatttaagaaagtgggttccaaattttctctctctgaatcattggcaaataacaacaaatgacaaagaattaagctcagcattgtcaccaaactagccatgtcacacctgtaacagttaaatacctcagtccacaagcttgggtgcagaagaaatctaacattctcttattttcttcacctgaacttaatttatatttccagtccctaatcttagtggcagatacttcatcttagtcaactcaggactccttcctcttccaagagatacagctaataccaggccctatgcagggagtggtgggcacattcaggccagggaaagagggttcattggccaaggtggctgcggaggcctgagttgtccccagcctcaagctctcatagtattttctggtggtcaagggccagggcattactggctgttcctgagccactttgaaccctgaaaggcctcatcatggcgtattctgccctcaaacttgggagacagctccgtccttctcacactggggcacgtgggagctctgtaaggtggccacagccagctacatgattttcagggcccagtaaaaaatgagcattcaggatcccctgttcaaatattaataggaatttcaagatggcaaagtgcatgaagccaagcacaggacgctatgcagttgcacaggtcaaatgcccatgaagctggccctggaatgaccttcaggcccatctgctgagatgctcctctcagccactgtgctgccaatcctcccctcctgcactggagcccaggaaagctgggggactcgctgctctcctgggcactgctggaggaagggatgcaggttattgctactcctaaatccacgcaaaacttttaggatttgtatcatctccccttcctctggaacaccaggcagcatctcacttcccagcccacctgcagctctcatctgccccccaaatcccaatgtgtgtctgctcaggcccagcagggaacacctgtgctttactcatgccttttcctttgtctgagttgtctcaagaatcttgcttttgcaaaaattgcatctgttcaactcaaattccttttctttgatttttggtgtgatcatctctttccagaagcaataaatgccaatgcctggtggggggaagagcagccaatgcaggaatgctaggataaaacaaggtgacttttctttcttttttcttttttttttttttttgagatggagtctcgctctgtcacccaggctggagtgcagtggcacaatctcggctcactgcaaactccgcctcccaagttcacgtcattctcctgcctcagcctccgagtagctgggactacaggcgcccgccaccatgcccagctaattttttgtatattttttagtagagacggggtttcaccgtgttagtcaggatggtctctaactcctgacctcgtgatccgcctgccttggcctcccaaagtgctgggattacaggcgtgagccactgcacctggctgctaaaacaaggtgatttttcaaaaaattattgcacaatgtgcaatgagccctatatcatcatcctttcaaaatattctacacaggttatttccaaagacaaagaaactcagtggggattgcatgggagaaactgtgttgcgcactcctatgaaggatccccatgtagccttcacagtttcacttagattctgtctcttccaggacgtcctctcttatttcacctaacttgggctagttcgtccttctgaagctcctgtaatgtaacagctgtgcctctagccctctctttctctcttctttgtcttgtagacatgagagacagcagtgagtaatgggacaatcaccaagcatgggagagggacaaaggtggggtaggccctgcatctgtgttcgcttggacaagctgcctgagttctccagacatcaactcctcaatctgaaaaaaattgagcgcaattattcctacctgctggcttgttggtggctgtgcttgccattgtcattttaatttttgttattactgttgtataagttttaggtctgctattagatttaggatccttcaggccaagactttattgacctttgtgttcctagcccccttctatgccagcatagaggacagtccctggcacatagtagatgctcaatagtatttgtcggggcagtgagtaaattccctgcctcagtttgcttgtccttgaggaggtagatacaaaatcagaactcacagcttcccttatccacctccgatcgccagccttccagagcatttgctgagctcaccaccagggaacgaatacaacaacattgattgcgatgctgagttgtgccagactctgtgctaaggttggagtgaccaataatcccagtttgcctgagactgagggatttcctgggacataaaattgtcagtcctaaaactgggataatcacagaaggaggaacaggttggccacccttgctaaggcttttcatgcattatctctttctgtcttttttctttatttttttttttaatagagatggggtccttactatgttgaccaggctagtctcgaactgctgacctcaagcaatcctcccatctcagcctcccaaagtgctggaattacaggcttaaaccgccatacccggccgaattatctcttatctattttaaatatgcttcatttcttagaacagttttttatttatgtatgtatagatatatttgctttgtggggcaggggggtgcgggctggggggacagagctgctctgttgcccaggctggagtgcaatgatgtgacctcaactcactgcaacctccacctcccgggttcaagcgattctcctgtctcagcctcccaagtagctgggattacaggcgtgtgccaccacacccagctaatttttgtatttttagtagagaaggggcttcaccacgttgaccagactggtctcgaactcctgagctcagttgatccacccacctcggcctcctaaagttctgggattataggcgtgagcaatcatgcccagccagaacaattttaaatatacagaaaaattgagatgcttgtccaaagagcccccacatgccccacacccagtttcccctatttgtaacaccttacgttagtaccgtaaatttgtcacaacaaatgaaccagcacggatacgttattatgaaccaaaatccatactctattcagatttccttagtgtttccctgcgtcattttcctgctccaggctcacactcggaataccacaacacatctactttccatgtctccttgggctcttgttggcagtaatatcttctcaggcttttttttttttttttttttaatgatgaccttgactgttttaaggcgtactggtcaggtatactgtagtatctcatttaatcctcatataaaccttaaagaatgaacactattgttccattttaccaatggggttgctgacgcttacgtccggtataaccagtaaagggttgaatggtaatttgagtttccactgggggcaatgattccttaataacatcaattcatagtaagtattatcttcagtgcttgttctgtctcaagtaccctgcaaagaagcccgtccctattgtattctttcatcctcataagcacagcactgtagacactcacgtatgcccattttacagataaggaaaccaaggccaagaaaggttaagtctctggctcaagtcatgaaactgatggaagaatgtagaccccaatccagggcctctgcaatctttatgctctgtctttctaggaaatactttctccctattaaagattgacccgtttggaggaatattttctcccttctgctgtggaacatctacagcagggtttctcagacttaactgtacctactcatcacctgaggatcttgttaaaaatgcaggttccgtaggtctgggatgaggcctaagaacccgtatttcttttcttttcttttcttttctttttttttttttttttttttttttttttgagaccaagtctcaccccgtcacccaggctggagtgcagtggcacaatctcagctcactgcaatctccgcctcccgggttcaagcgattctcctgcctcagcctcccaagtagctgggattacaggcgtgtgccaccaagcccagctaatttttgtatttttagtagagatggggtttcactttcctggccaggttggtcttgaactcctgacctcaaatgatctgcccatctcagcctcccaaagtgctgggattacaggcgtgagccaccgcaccgggccaggacccgtatttctaacaagacggcaggtgcggccacactgggagtagcgaggctggacactgactcctacctcacattttcctttctttccggaacaaacacggtaactgctgtgtgggcacacaaggcagtggccagaattctcaggtcacttcctgactctctggagctccaactgtcggcagataaaaagaaatctaggcactgagaaatcccaggcactaacattccggacgaccaattggcaactccaacctctccagcagggtttgtaaagaaaacgtaatgagcccaggtgaggctcattagagccagcctggaattctgccagtgctaccatgagctttatgccaacccttgattttcatatcagtggcagtactgacaaggaagctggaaggcaggctgggaggaagctttgtacccatggagtcctctccctcctccccatccagtagctctcgccacgaggtgaggcagttggcttcatcaaatcagaaccagctcatgagtaattttcactgtcttccctttctaacaggctgggccccaggtgatcctaaaaattaaatgaagctcagaaaatgagacacttaggagagccaggcatgaatagcctatccccggctctagcggaactctttacttcccttgtcaatttccttggacttcctttgggcctttgactagtggcaaagtttcactccagaatctcacagctctggagtatttctgccagagggtcccagtcccctgtgtgttttcttgttctcaagcaaaatttaaaatgggcaatggtagccaatgctgtcttttctccttgtaaattgagatatttatgctgatgcaatattttcagaataggactctaggctgcctccaagcttccaggtacttcccagattccagcaaaaaattcttactaccatcaccctcctcctcctcatcatcatcatcatcatcatccccattatcatcactgtcattactgggaatttattgcatgttaagcaccaggcttgcattttgcttgtattttctcaattaatacaagcattgaggaaggtcatattgttattcccacattaccaaggataaaacaggcttaggtaaaatagcttcccaaggccaccctaccgctgaattgaccatactgtctgcttggccactgaagttgagaccaaagatgtttttcactatgcacatcccccaaagatttttggataaaaactgattgacttacagttctggccaaaagtcaagctgatcattggtttttatatgagagagcgaatgacaaagagagaagaaaagaagagaaaaatcactgaattcacaaaatagtgccctagtggtttataaatgaggggaaaaatggcaccagtgacactgtatttatactaatcactaaaagcaaatgaattccaactgggtatgttaaaaatagatgcatgttgatatgtatatattaacctaatatgagaaaaagtaaccccattgagaaaagttagagataaagtttacaaccttcactttctcccctgcacaatagaacttatgccatgataaaatcccacaacttagtcatttgtttatttaaaatgcatttgttgagcacctcctatgagccaagaagtaaagattgtgtaaaaaaataaaatacgtgggtagatggacaattcaactagcaaatgcaatgcactgtgattgacaagtttgagtgtttgtgttagaattatttgtgtgcaagcaacagaagctgactctggtgaatcctagcaagttcagcatctcatgagaaaaaaagagcatctaacacagacagaagggaagtggtcagggaagcctcctggaggaagtgacatttcagttgagacttgaggaagaggcagaggaacctgtgccaaagtgtggatgtgtgtttttgtggatatggagcagggcagagaggctggttggcaagtgtcctcagcaggggacagcacaggtgagatgacagggaactaggcacagaaaattctctcacaaggcagtcactggaaccacccccaccattgcctgttagacacctggaaatagctcttggtggttgggagaaatggggctaggtgggaaacaacgtcagggaataacacacacagaggacttgtctggtcccccgtcccccagtgtagaccgccataggaaagctatgttgtaagaaatcatagaggaaggagacagcacaaattaaaactcctactatcataagcatctagcaagcattttatgaagctgccttgtgaggaactacttcactctaggaaaaaccctcctggttaccatgactcagagaacgatctgcaaaataattcaccaaattagagtttgccgagtgcacatttgtaaatctgatcccgcctgcccgcccccccattctgttgattatatctttcatccccaagaatgaggccaagagcctcctccctgcccctcctcccctccctctgtaatcctcacccctcatttctctcccctccccacttctcagcatcctgccacccctaaggcggtggcgtgatcacgtgctgatttcagggagttcattaaaaaccaccaccctccccgctgaccacgaggcaccggcagcagcccctggggccatggcgctggcaagagcatgccggtcactcaagaggggccgacccactccgaggacagggacccccttgcacaaatgagaagagccagcaaacagttaatggttgaatcctttgcagaaaaagtcaaggcagacttgtgattcttgatgttaatgaaggtgtcacacattgtctagagaaagttgtgcctggcaatcttccctgtttcggatgcctaccccagtgacatttcatctcacatccaccttaatgaaatgcataattaacatattctaattgtgctgagcgctgcgatgattttgacagaactcactttccatgtctaatttgatgctaatttaatctgttcctctcccgctgacatgacctttcttgattgagtttcactgaggaaattttttgatggattgatttatcagcattgcagagacaacaaaggctcagggtgcacgacagaaaataggaagggaacggccctcgaagccagcacgctctgaacttgccggctggaatgtcctctttccagagacggcttgtctgacctactgatggaatttgagaaatgtgacatctgtgcgtgggtttgatctctccgataaagacagtaaatatcttattgtggttgtgaagctttgcatggaaaacttctctagggctattcgaaggaagcttaggctcctcctgttgaccaaaaccctaagcgtgtgaggccaggccacaggttgagggccccgtctagggtagagtgtttgctcattagctttaaccaggagaaagcacgaagaggtggaagtgtccgtctcaaattaaaacagagaaacgtcgcaactgcgtaggtcattgagcatggatttcctacttttagatattctgtagacatctacaaaaaggggagttaaacctagatcttatggaagcgtctgtggaatgtcctccaatacctgcccccacagatacacagagtctcaaagctattaatataaacatctctttgtccagttcctggtctttgtagaagtaggtgctcaggatactgatgacagtcttggagtgtcccagttctcacaggattaagtggctgagggcattagactccctcatcctgaagatacaggggtcaaaaccagaaccatagctgaatgggctcctgggaaagcagtccctcaccctaccttatacaaaagtggctgcttttcaacagctgtgaaggcttggattccaaggggcttgatcaaaatttctcaggtttggcactattgtcatttgaggctggatcattcttcgttggggtgggaggggtctcctgtgcactgtaagttgttgagaagcatctctagcctccacccactaaaagccagtagcactcccattcctgagttgtggtgactaaatttgcctcagattttgccagatgtgtcctggggaggcaaaatcaccactggctgataaccactgaggtagagggccaagtgataatgcctgtgacccccacatgtctgcattgctcaacaccccctacttcctctgcccagtgtcacctccccagctagacgttgtccaatggagcagacaagtccttatccaccccccaactccttattcaacttctcccttttccaaatcatatatgactacactgtattaaatattgatttatttattgtctgtctctactcaataaaccataagctacataaggctgagatgttgtccatcttttttactttttttttttccaacttttactttaagtttgagggtgcatgttcagaatgtgcaagtttgttgcataggtaaacatgtgccatcattgtttgctgtacagatcaatccattgcctaggtattaagcccagaatccgttagctattcctcctgatgctctttttttactttaattatggtaaaatatacataacataaaattcaccgttttaagtatcataaagtatgcaattcagtggcttttagtacattgacaatgtgtgcacctatgccactatcgagtttcagaatattttcatgaccccgaaaagaaactcccatacccgtaacgtggtaaccctactctttccctcctcccagcccctgataaccgctaatctgtgtctactgatctgcctattctgtacatttcacttaaatggaatcatacaataagtgaacctttgtgtctggtggttcctcaataagataaacatgaagtgaccacaggacccagcaattccattcctaggcatacatacaaaaaacatgggagacaagtgttctaacgaaaacttttatatgagtgttcctagaagcactctttgcaatagccaaaaggtgtccatatgctcatgaatggataaacaaaatgtggtatatccatacaatggaatagccataaaagggaatgaagtgtggatacatggtgcaacatggatgaaccttgcctgtcttttcatcgttacatcctcagtagtgaaaatactgcctggcatgtagtaggtgctcagtaaatacaagtggaataaatgaaaggcatataaaagtaaatgaattgaggatagtcaagaaccatggataactagttagaagggccattcacattaactgtgtttcttttaatttagaaaaaaaaagaaaagaaaaaaaatagacccccccaaaagaaacaaagaaacaaaaatgaacctgatattgagccggaaattttggaggcggggaggatcgctgtatgtgaaaaatagttgaatcatggaggggagctggtaatgaaagtgtcatgacagaatactaaaacttccctgctttctgttctattttgttttgtttcaatgtcaagctctacttcttcttcccaaatgtttctttcagaagcagatacttaagctatccatagtaaatagatattttccttcaaagtactctcctgggaggatgaaacatttattccaaagtagttgccctgactgcaaagatttttgcaaaatttcttcaggagctgccttccgagccccgcaaggataccaagctaacgagattatcatcattatgattacacttcatcatagatcaaaagcagtttaactcggcaaaatgacctggcctgcttcactagtctttattctaaggggctgctggctttgttcaaaggctaaaatctctctgcaaagcccagttgaacagtgtccaggtgtgcccccaaggcaggggcaaagtggagcatggtctaaggggtcaagctacttaggtctcaatccttgctctaccactaactgggaaagtgtgcctcagtttcctcatctgttaaaactgcatagtaatagtcctacctcaaagagttctcttgaggattaacttagttaataatacataagccaagcattagaaacaatgcccaccacatagcaaagtcttttaggtataagctcttcttataagatatgtgtctgagccttttcagtaattgtgtagtggccaagtgaggtggcccatgcctataatcctagcactttaagaggctgaggaaggcagatcacttgagtcctggagttctagaccagcctgggtgacacggtgagaccccatctctacaaacaatatgaaaactacctgggcatggtggcatgcacttgtagtcccagctactctggaggctgaggcgggaggatcacttgagtctgggaggtagaggttgcagtgagccaagatcatgccactgcactccagcctgggtgacagagtgagaccccacctcaaaaaaaaaaaaaaaagaagtgtagcttccccaggtgaagtctgaaagtggtacacttactatttttaaaaataattattaagaaatcaggcgtgcagttttaatgcaatcttcagtggtatattcattcttatattcttattactgttgtaacaagttagcacaaacagtggcttaaaagaaaacaaattcattatctttcagttccagaagtcagaagtctatgtcagcttcgtagagaaaaaattaaggtgtcagcagaattggttccttctggaagtcccaggggattgttttcttgcctgttcagcttttagaagctgcctgcattacttggctcaggggcctcttccttgaattactccaacctcttctgccatcatatcctactaatgactgatcctcctccctcccttgtataaggacccctgtgattacattgggtctgcctgaataatctaaaccaaggttcccatcttgagatcctgaatttaatcacatctgcaaagtcccacttactatagaaagtcacatattcactggttctagggactcgaatgtagacatctcagggacatttattcagcctatcacatatgacttcattttaggtggaaagtggttctcagtggaggatatcaattcctttctatctctcagtgcaactctgttgtgccattttgaggacagaaaaacaatgtggagttagccactggaatccaaggttggatggacctctaggacggtgaagtctcctgtagttctcttcctcagtggctttgtaaggattttgttatgtttgaccagcaaccccaggactggagttattcaaggggtctaaccccaaacacatgtcacatgagagaataccaatttggctgtaagtttcattgtgaccttgtatcctacttgataggtttaagatagcacagtcctccagtgcacctggctaaagtcattcttacatagcctccatcaggtcatgatttttgttctgttctcgtatgtttttgcagcaccaaaagaagtccccagcaccttacaggattgatattgagagcttttacagtgtttaaaggtaactgtttttcacaaagatgaaacactttttgtctgtttcaccaatatcccacctggaatatcctgtatttctctgaatattatagtaacctgtggctatcttgaaacttccaggttttcccatatgaaactagaagacagacttggaaggcaatgttgcttagagcaatgcttgctcaccaaatctttttcattagaatagttcacttagatactgggcagttttgataaaccagcattcagggaacaaagcttttatgaaggttccagccataatttttggcctcagaatattgctgggtgttttttcctctgtcaatctaaaatgaaaatgtaacatttcaattgcaattcgttaggaagaagcaaagaaggggatatttgcatttgatcaccaaattggacgagactaactttcatccgcatctgatctgccaatatcagcttttttctgaaatataaaatagtcattaattcactgttttcccttattgagtgaatagatttttttttctgtcacctgtgtttttatccaaaatcagcaatagaatattttgcatggttaaaaactggggaggtgggaattgacatttcctttgaactccaaacaaatggcaaacttcaaaaaatgtttgatgaaatactgcagtattataacccaaagaatctatgatggagaaaaatatgaagaaaataaagaatttttttaacgaatggattatgatacttaccttcagtaggttagctttagtgtttacaagtattaattgattttttgtcaaaaaaagttacataaaaaattaactcaattatcatcaatccaaaattttgaaagataaaatgtggcaggtggaattctaaaaatggcctctgagattcctgtcccatgtttattcaaacactaacctaggtacagcttgtgaagggatttcacagatgtgactaaagtgtcaagtcagttcactttaaaatacagagatgaccatatcacacgagtctcatccaaacatgaaatccctttaaaatcaaagcttcttccccaggtggtagcaaaaacagacatcttcctcaaggaggaaaacaggaagagaatcaaggtcagagagatttgagttcaaattttccacttattggttttatgaccttttgaaaagtttcctcataccttgtgcttcctttcctaatttgtactgctagtcactccctaaatttatgggaaggaattaagagacagaatgtacacaaaatacttagtcatgtgtcagacacatactatgtgcaccataaaagataactattattactttagaaattgttcactctataagattatccttcactgactcttgcaaactgtattctgattctaaaaccatgtgagttcacacaaaatgacactgaaaagcataatgcaagtgtggagcatcccaccatgtgcaaagtttggttggggccagctctttaccccactgcattccgttttggcccctctcctaagctctttttttttttttttttttttttttttgctctatttactgcatatctgaccaacaccatgaatttccagaaccccagtcctttatcaccaacatcattctccacaaaatttaagtaggctgtgcactattcttacagggtccaatgaggaaatagtcttataaactaagttaggctaaattgttaatagctaatgatgacttagcttcccatatgcacttcatcaaagggatttgaagccttacccctaagaaataaggtgggaagtctgggggcggtggctcactctctcagcactttgggaggccaaggtgagcgggtcacgtgaggtcaggacttcaagatcagcctggccaacatggtgaaaccttgtctctactgaaaatacaaaaattaaccaggcaaggtggcacgcccctgtaatcccagctactcaagaggctgaggcacaggaatggcttgaacttgggaggcggaggctgcagtgagcagagatcgtgccactgcaccccagcctgggcgacaaagtgaggatctgtctcaaacaaaaaaaaaaaaaaaaagaaagaaataagatgagaattttaggcatcaacttcggagaggaaagaaaaattatttggaggtgcaaattcctttggtattagtaaaaattgactcacatgggccgtagtctccaccatgtccagtaaatgtcatcttcctctgttgctaatccttctgcttatatatatttgcttaatttttgccctgaccaccaggaaaagatttcccaagttccttttttctcatgtaaacaatttgtattacttagaataaggatagtgcatgcttatttataaaggactagaaaacagggaaaatgaaaatagaaaaattaaaaatcatctatagtctcacccttcgtagaaaatgatagtccaggatatcagttaaggaggggtttaaggttggtaaatcaggttggaagatggcctggaagatttcccctgaggctgtgactgcatagcaaacacccagtgatacctgagagtgtgagcgggttgctgatggagattaagggaggaatgaagtcttggcccctagctattcaagaccatctgcaactgcccattctcaatattttgtttgtatttctcatatgtgtgtacacatacatgtcatagaattatttaatttttggtaaaaactgaagtcatacctacataatgttttataaatcgattcttcctagcctaaaattgtgaatgtcattcccgtgccattaagcattttcttctacattcatttttaaaggccatacaagaatattccatagaccaaatacgtattttttcattggcctagggttgtatatttaggttgtttccaactctgattctaattaacagcatacaactgagcacctttgtaaccaaacttttacacatatacgtgattaattccttaaattcctataagtaaaattgctgggtcaaggagttacatattttaagacttttctgaaataactatgtcattcagtttatctcagatttatcatcaggcagttgaaacaagggtattagaaatcattttagaccaatatgaaagacgaatggacattaagcatcagtagtctttaacatgaacttttcatagataccaaagagtagggggatcaactgtttctatttgcccaggactgaggggcttcctggcatgtgggtcttttagtgctaaaaccaagacaatatcaggcacattgggacagttggtcaccctatcagagaagaccagggactgactgaccataatggaaggattcagtgtaatgccgtcgtaggcaccattgccagaaccatggtcagaacaaggtgaaagtttaactacatcattagccctaacatggtagaaggcaagtaatgagtttcagaagccatgttcaagaactttgaagtgtaacgacgtagaattatggggtagagagcatagactagagaaaatgcaagcttctaagagtccaatgacaatttcgggaaacatgaggagacatggtgctcttgtggtggcctgtattggaatctggtttgcccctcaagtgaatagtgttgatttgaaaacttctaatattctttcttttaggagatcttcttgatagttgcagaaattctgactggaatagattaatgtcttgctatttggcttgtatagtagcagcataaaattccacttcttcttaactgaagaaagcatttaatttaagcacaagaagatgactcaaactgagccactgcaaagcaggtgaagggctcaaaacattatagtggtttctcaatttgagtcatattttcattctcttgaatcaaagggtcacttaacaaacatgatttaattatatatgtcttgcctgatttttagtcacagagaaattccgagatgaaaactctggaaaggtgtcattaactcaaggaagacaagggcagagttaggctagcaactagacactctgtgtacagtttcatatacaagcaagactttcctttaatattgataaagaattgagtatcatgtatgcattcccttttatgatatacaattaattgtaagttatttccccttgtatgcaaccatccacatttttcttctgaccttttcctcaagtcttacaactacttttaatgactgcattttggaggtggtcccaggagaacagatgttgccttataatggtgtttttccatttttttctttgattgggcaagggggttggaagtattatttagtcattatatggattcctctaaaaattgttcaatagaatatgtattcatttattcacttacttattgtttatttattgcctagagtatacccaacactgaggatacaataatgatcaagacaggtctaatttctgtcccatagagcttaaattgtaattagaaagaatttttttaaataagcaaaaaggaaaagaaaaaataactacaaatgataagtgttctgagggaaattaacattctaagagaacacctgggagacaagagccctcctttgggcagtatggccaagaaagtcctttctacttgcatgaaatgttctcagtagcatcgttcataaatatccaaaaagaggaaacatccaaatatccttcagctagtgagtggacaaataaaatatgatgtattcataccatggaatgctaaagagcaattaataaaagatgaattacttgttcatactattataatgataaacttcaaaaacattaagctaagtgaaagaatccagacataaaacatactttatgtgattccatttatatgaaatatccagaaaaggcaaatctatagagatataaaataagtaagtggttcctaaggactaggagtgggaatgaagagtgactgcaaatgggcactagttttctttttgggaagaaaaaaatgttctaaattagattgtggtgaaggttgaacaactgaaattatactaagaaccactgaattgtaccttttaaacaaatgaattttatgacatgcaaattctatctcaatgaagctgttaacaaaacaaaaagaaggatgaaagaataagcacaaagaagaaaggatttcctaaggaggtgacatttgaactgacataggacttatgcaaagagaggtcttggctgggactgggagagaacactccaggcagggagagtctgtgcaaagatcctgagatgagcgagcatttggcatgcataacaaactagtggaaggcaaggatggcttgagtatgttgagcaaagtttagaggtagtgagaaaagaaattggagaggcagatagcagcaaattcacacaggacattgcattgcaggcctgatactgagggtgcttcatgtgctacgaagacattgagagattttaattgatgctatgatgtatacttgacaacattctaccttaataagaataaagtcagccaatactgttgacttactattctatgaattttacacatactaccctatgaggtaggtacccttattattatgagtaaggaaagtgagatacaaaataatttactcaagaaatctgagggataattatgatctgaactcagttagtccagcaccagagcttgaaatcttaaccactgccctacccttgaaagtaggactagcttcataggcatacaacctatgcagtcacacagggccccatgcttagaagagtcccacacttgctttaacagcctgctgtcaccatcttgaaatgcttaaaaagtttttaataaagagacctcacattttcattttgcactgcatctcacaaattatgcagctagtactgcttgaacagtcttttagacattttactaccagaggaattattaatccattgaagatcatagataaaagctggccagggaggagaggcaaacccttagaattaacatcctatgtcttatgcatgtccattttgggacagaactctcaaaaggatccataagtccaaaagggttaagactccttgatttaccagcagccaccattctgatatttaggaatagctagataatgaagtagacttactattcagcttcctgttgtcctacatctattgataaagggttgcattggcaacactctttccagaaaacaggaaaataataataataataataataaggatgaatgaaaataaatggaaaagaataaattctaagcaaaatattttctttagtgtgtgtgaatgtgtgtgtgcgcatgtgtgtgtgcatttttctcaagggacctaaagtttgtctttttcactatcataataattttttaaatccctaaaacacaaaaatcaaaaccaaagggacagttcttctgaatttatactaatgaatttggtcaaatatatcactcattttccgctagtttgcataaattccatttctcttgtttcagaggctgacttgggttataggagaacttttaataatcactattacataggacaatattctgcatgcaataattccacaataaattcatgtcacgtgttaattttgacattataattaatgtatcaataatttgttactattattttcttataatctgggcttacttgtaaccagaagaaaactaaagtttaatggcaagttttcaattgcatttaaaatacccccaggccaggcttagtggctcacgcctgtaattctaacactttgggaggctgaagtgggagaatcacttgagcccaggagttcaagaccagcctgggcaacttagtgagacgctgtctctattttattaaaaaaaaaataaaattaaataaaataacccccaattaatttctaagctagtaaaggcaaataataaaaaatgtgagctcttgatacaaaattttttagaatttttttgtgctcaagaaacaattacgtactcatgaaaatgtgattatccactttaagaataatagggattaaaataggcctctgaatttgatatcgtgaaatgattaattgttcttcgtcactgaggtgctgctttctttgtatgcttcattgttcaacccatgaagtccctagatctttgagctaccagacaagtgatatttgtgcctcctggggctctcccagtgtgaccccacaaggagaccttctgactctgtttattcttagagtgagcaactgcatacaaatagaagatgttatgacacaggccaccagaaccaaatacagagacaagaagatatttctatgaaaacaaaatactaattctaccctaaactaaggctagactttcccaagtggaaaactattcctggaaagaaccagggagagatggtataatttcattttcacatggacgaccgcaaactcaagcttctttaaaagtgccataatgaacccagcacacgaacactctggctctgagacaaaagcaaggattttctcatttgccacctaacatccttgtaatttcccagttttagcctgtgtctttatggggggaagcaaaaaaagcaaaaccagctttgtattgttttcatgcagttactgagcctgggtaaactgggacaaaatcctagcaactgagaccaggcagaaaaaaaaaaaaagtttctgtggttctttttttttttttttttttttttttttcccaaacagagtctcattctgtcacccaggctggagtgcagtggcaggatctcgactcacggcaacttccgccactcaggttcaagcagttctcgtgcctcagcctccccagtacctgggactacaggcgtgcaccaccatgcctggctacttttttttgttttttttagtagagatggggtttcaccatgttggccaggctggtctcgatctcctggcctcagttgatcaacccaccccggcctcccaaagtgctgggattacaggcgtgagccactgcacccagccgttcttcatctttttgaaaaaaaatttacttccaattatttgatggtaaaatccaccaatttatgcataaaataaaatggcaagttagatttatttggagaaataaattgtagaaaccattcatccgttagggttttttaaacggtcttgtgccacttgatgaagcaaaaataaaacttcactcagctgacagataatctaggtgacaaaatcttttgtctctcccttatgaagtgaccgctttgaatatttttcttattttaaaaaccaaaaatcctttgaatgctatttattattttaggaatcaaaaaccaaatgtctattgtgaacacaagtctaagaaagagtaatatgaaccagtctttttcaagatggcctgctttttctgcttgaaaacattcccatgttaacgtttttcttcctggttgctctgttagccttaatctgtaagtactatttttttggagggcctactctaatccagttgttttatagacattatttcatcattcgatcctaccaacaactttatgaattaggagttacaaatttgcttttgtagataaagaagctcaacatcacagaccttcattcataaaaagggtgaaaactgtctagggtcaggcagactggggccaaacctgttctggctctttcttgctgtgtgatcttagccaagttatttaacctctctgtgcctcaatttcttatctgtaaaatgaaagagagtaatacatgcctacaattccttagccgtgattctcaaatcaaaaaatctctgaaaattaaagtgttttcataaataggacagcagggaacatacttaaacaaaaatattacacgttgtttatctgaaactcacatttaactgggtttgctgtattttcatttgctaaatctggcaacactagtttggcgccaacattcatttggcataaagattaaactgtgctggcaagaggctattacaatctttatttgtcccacgtggtgaagatctgagcagcggggccagcaaatacaacagctctgagccatgtggttggtatgttcgaggacagagagaaggccactgtggctggaacagaaagatggctagacaaaagagggaaaggagatcaagtcagaaaggcaggcaggagtcagaccgtggagggcttcgagccaggctaaagatggtgagaggtaagcccaagatcacaccgatggtgagcaacaaaaccaggattcaaccctaagtcagtcttattagtgcattggtcagtctgtcaacaaacatcgtgggggaaagtcatccttaagacatcgttataaagatgtcttcaggctctggaactaattgaaagattatcaacttggcagccaatcagctcctacattgactttagtactagaaagaggtacaactgaaatggacttttcagtccaaggtgataacattgatgcccatttcatagcccttgctgagtttctgtgcaataggaaagcatcttaatgaaaaaatcaagatttccaagtgaagggggaaatgatacactttgtaaatgtagtataaataaatctaacatataagacagtgtaataatgataattcagtataagacagcatatgtcattttgtcacctaccttgcacacttatggttacacatatcacctccttttatgtcctaaggtgtaatttacacagtactagaattggtggaacgtgctcatctggtcagcctactttaagtactctgcccgtgacttttacttttgttaaccgaagtcaataaatatttcgagcttctactccatatgaagcacagtgctgggcataagagacatagaagcagacaaggtctactcttgaattcaccaagtttgtagtgactatatatttttttgtttctagaatgcacaacgagtgatatttcatggttccaagatggtgtgatttttgtcagggttttaataataacatcacagttagacagtcttacaatgtgctaggcactgtgctaagcgtttatggggattatcttacctaattcttagaaagcccaaaaatgtagcattatccccatttttcagatggggaaaccagagattaagtatcttatacaaggtacagagcttgtaaacaatagacctggagtatcaaacccaggcagtttgacttcaaagtcagttcttttaatataaagttgtgctatgacaaaccttatattaaaaacttttgtgttcaggataatgccagaagccaagctctcttctattttagctaagatgagatggtttctcgcacagcaggacttcctcaagcctcttctttttctccctctggggggctagttcgggcttttcttttgaaccagtgaagcacaggaaaaatccacacgtgctgaattctccacattggctctgtacccgctgcccgcccagcccccaggatttgccccagcgtggctgtgctcactggccccatcctctctgtcaacactgaggcatcagtaaataaagaacaccccccaaagcttgtcagattcttctgcactggtgcacacaccccagtgatgagcaaactcctctatcatttgcccaggatctttgaatttagatgctgggtcaagaaagaatgacacttttgcaggaagctgttctttgggagaaatgatattttttagcttcttcctcaggcctgcaacataataggcaggtattgtcctggtgataaatgatagctcctctggaagaaattacaacactgtgtgtcataagccgaggcttctccaacattcctctctgctgtggagtgggtatagatctggccacaaaatcagaagtacctgcaaaacaaactcttttttataactcaacttaaattttttgtttcaaattcccattgatctcaattaatggcatattgtgtctgagtcactcttgaggccttccttccaccctttcttttgatcaatagtttataaatgggaataatatcgcccttagtcagctttccagaaattattttgggggatcggttgtcacaaagattgagaggtgacaccgacatttatttggtggtcagaggccagaggtgctaaatgtcccgtaatgcacaagacagtcccacaccatgaagaattgtctggcatcccaacttttcaatgtccagtagacattcatgcaggtgaaacattggtttctaactctctgagccatgcacacaaagcatccttcacatagttggttttcttttgttgttgttgttgtttgtgttgttgttgttgttttgtgttttttttttttctggagacagagtctcactctgtcacccaggctgtcgtgcgatggcgccatctcggctcactgcaacctccacctcccagattcaagcgattcctctgcctcagtctcccgagtagctggggtttcaccatgtttgccaggctggtctcgaactcccaacctcaggtgatccaccacccgcctgggcctcccgaagtgctggcattacaggcgtgagccaccgtgcccagcctcttcacacagtttgttgtttttttgttttttttttgagatggagtctcgctctgttgcccaggccggagcgcagtggcaggatctcggctcactgcaagctccgcctcccaggttcacaccattctcctgcctcagcctccagagtagctgggactacagacgcccgccaccacgcctgactaattttttgtatttttggtagagacggggtttcgctgtgttagccaggatggtctcaatctcctgacctcctgatctgcccacctcggcctcccaaagtgctggaattacaggcctgagccaccgtgcccggcccacacagtttttatatgctctgaactgtatagaaatgtaagtaccctgtaaattgagggaagactgtacttcgttctaactgtacagaaacttgttcagcatatcaaaaactcatgtcatgaaggcaatattatgagaggcattcgattctctgacacaacacaccagtccagatctgtatttgtgctgtcacattcagtgtttctatgtataatggtaagaatctgattgctttaccatatgttctagtatgtcatgccgaagtatttaaatgttggaatgtacattaatttattataaatacttcccttgtatttgccccttaaaaattgtgcttgtaaataagggatttcaggtgtggacaggagtatttagcagactatgtgcatagcccactcattcctctgaacactcatctccacacatcaaaaggtgtcctccgccaacacctgccaccctcaggtgctgctattcttggcctcaggacgttttcctggctttgggatcacactcacagccatgcagcatcataggatttaacgaatgccccagaagcagcccttgaccaatggtgcacagtgagtgggtggacaatatgcctgtcaccccgtaggaggggtatacccgaggcatgtgctgcacgtctcccggaggtccccagtgggaatgagcctctgctgcccatggtgggccctgccttgatctcacatcctggattggcttctggccttttcctatcttgctataccatcaccctagctgtgcttcctgggatcatcttctgcatcagctacttaaattgatgactttgtctcaaggtcaacttcttagaagcccaacctaacgtgggccattaccaagaatttgcttccaagagggacattgagtgtaacagggttcaaagccagtgctccagacaccgtcaagatttggaattttgttcaatgccaaggagcatatcattgggatatggattacccctttccatgtggccccttcaggactgagatctcctgattttgaacctagcttgagataaagtcaattctccaacatggagtctgtgaatccatctctggtctccaggggatgcagaggagattcatcaaaataaagcagataaatgagtgagtggagctgtctgggtgcatggaaagtcatgcagatagaaacatcttttgtgactgggcgtggtggctcatgcctgtaatcccaactacttgggaggctgaggtgggaagattgcttgagcctgcgaagtcaaggtcgcagtaagccaagatcatactactgtgctccagcctgagtaacaagcgagaccctgtctcaacaacaacatcaacaacaaaaatttgtttcccactgtaaatagaaacctgattcatagaatctcattcttttatttgagaaagatttatggagcatctattctatatcacgtactgggcatagagtggtgaacaaaacagacaaaattattttttctatcaagttgggagagactgataataataaaaacatatggatggtgttaaatagtaataaatacctttgagaaaaaaagaaacaggagaggggaagaaggaggactggagatgagggtggtgagtttttaaaagatagatcagggataaatggcaacagacactcagcattaaggtcgagggttcgactccttgcagggcatggttatgctggcaaggtctgcctgggaggaaggtgcttctgctcagctcaacaaggaccgccgtgtgggaagacaaagcccagctggcaggtattctcattttccagaggaaacttatagacataccacctgcccggagagctgctagcaacaaggcaaagctctccatatttttaagagttcaaacttgccttcccgctcagcatgttcaaacaagagtcagggagtcgcgctggtgccctctcctctctatcctgccccatgcctcccctgaagccatcactttctgcctgaatgacaggaagggaaggagaggggaagaatgtagaaagaaaacaaatcacagattaggattacccagccccacttgtccagccagttttctcttcttctggatgcaaactgaatgttggaagcattgccttgcaaagtcagtagtcaacagggaaggttcagatttgtttcttccttgaaagctgcagaatgggatgttgctagagatcccagtgggaaatttcccagatagaaaagccatgttggcttgtggagtgccggggcttggcatgggggcactgccttggcagagctgtcttgatgtttctggaaggcattgccaacaccagcggaacttgcagcaggagttttatgaccctttttcatccaagccactatttgggcagatgcctgattacttctaatgactccatttctgtgataatggccaagtcctctgtcatcctgctgtggcctggaatggccctggttttagaaacgagatgctccttgtaacgcgtggaggcactaatggctgctctccaggatcctggcctcctgtgccaacaggcagaacagccaaaagcaacaatgcaagtgtgcagaaaccattcttgagacagggggatcattggtctgcccattactaaagatgcccaactctacactagtcaagaaaatctttgtcccttgaaattttatgtatttctctaacttctgaggaagccaagatctgagaatgaaggaaacttttgtcatgaggactgatggttgggcaaaaatgattggcctgttttctggtgctaaaacatgctcctaagtggccaattggcttctagtcataggctcttggcatgatgaatgcatgtgtgatggtgtctgtaacagctatcccagcttgggggggtcgggggaggctctagcttattcacttagtatgtacccttaaaatacacatgccagggtttctaaactgccatctccctaggaccccactccactactatttggggatgggggaggtcatactatctgaagttttgcaagtggagattttttacttacagtaagtgaaatggaaactgaccaataccttaggacatggttagatgccgtttacgctaagaggtgaccagctagatgctggatcctgacaaagcaaaggtgtggtcccccacctcaggtgacaggcagtggtcattgaagtgaatgctgagttaccagctggcaatgcttactctaccatgtggcttccaggctttcaacaaatgttcttccctgctcttctcagccaaatccacccatctcactacttccaaaccttggtctctcttctggaaaagtctctccagctcccagatgtcaaggacctcctgggaatccacttccttctccactgactcaaatccctgctagtctgatggtccagagatccttctttttccagagagcacttcctcctgttgcctccagcacaaaaagcctttcaccctcattgttctttgatcttttataatcctcaaccttggagattgtttaggctcaaagccagaatcaaccaaaattcagttccctttcctcaaaggcagagagggcttagctttcaaaccttccagtgtcagaagaaaaagaagggggaatacaaacagctcagtctctgtgttgaaatagtctgagtgcctagtcacctgaaaaagagagttatttggatcattctccagggctgttattttggagtaagtcacaacttacttggtccgggattcactgcccactgtggagacaaagtttctcaaattcctttatcagcatcaggaaccaagctattcagtcccactgtccacagttttgctgagaatttttctgtagagtttataagttattgtcattctgcctgtctgtatgtctgtccacctatcgtaaaagttaggtagtgggaaaggtgtttagtctatttaaggaaataattactcaaaaactagtttttgccttttgtgtgtgccaatacgcagcttgattccaaacatgatgataccatttcggtgcctaattccatctgcctgggatctaacaccacctctgcctcttactacctttgtggaaagcgggtcaacctctgcaagtctgttctcttcgcccaacgcagagtgcaagaggctttcccttgtaaggctgctgtagacattaaatgagagaggctaggtcaagagcatggcaaagaggaaggccccactgcgtattagacagggctattgttattattaaggtgggacaaatagaccacactctgttccatatttcccccctttggcctctaatgtttgctcctgcacattcttgaaagtaacagaaccacatgtcttttcaaacagtaataatgatagatatcagtattcagttctgactctatgcgaggcaatttgcatgcattatttcattcaaacctggcaacagttccatgaggtgccacttctatcagttcaactttgtaaaggaaaggcttgggctgtgcgacttaatcgagggcattgccgttttcagtgtagacgctaggatccaagcctggttcaaactccatagctgatactcttaactagccctgcatagtgcctcattattcaaatgccaaataattcagaattttgctaactctgcaagaactttattctcagccgggcgtggtgactcatgcctgtaatcccagcactttgggaggctgaggtgagcggatcacttgaggtccagagttcaagagcagcctggtcaacatggtgaaaccctgtctctactaaaaaaaaaaaaatacaaaaattagccaggcatggtggctcgtgcctgtaatctcagctactcaggagactgaggcacaagaatctattgaacctgggaggcggaggctgcagtgagccgagatcaggccactgcactccagcctgggtgataaaatgagactctgtctcaaaaaaataaaataataaaataaatttttaaattttttaaaaaacaactttactctcctgagtccagatggggttgactttactgatcctgtgcatttactttgtgtagcaaccctagatagtaggtactgctgaaaacaaagttacagaagtttttcttctcccattttcttattcttttttttctttttgagtctcactctgtcacccaggctggagtgcagtggcgcgatctcggctcactgcaagctccgccttctgggttcaagccattctcctgcctcagcctcccgaggagctgggactacaggcgcctgccaccacgccttgctaagttttttgtatttttagtagagacggggtttcatcgtgttagccaggatggtctcaatctcctgacctcgtgatccacccacctcggcctcccaaagtgctgggattacaggcatgagccaccacgcccagccttcttattcttcttttaaataagcccgtaactagtaatgaaaaccaaggataaatctatttatttgtattgtttcaggaacttcagatattaaaaagcaataaaacactaatccaataaagtaatttctgcacacttgtttatacgtgacgtagcgccgatttcacagcttggactcatgaaattgttttcctcccgcgctgggacaaagacccatgacagcagcttgtagaagctgccacaaggactgccatctgatgattcatttgcttcttggtttttcgggggcttgtgtttttttacttggaggtagggtttctttcaggggaagttcagtaaccgacagctacgagatctttacacagaacgatcactgctaaaccaaaccaaaataccaacggggttttggactcgatggtaattttttgtttgtttgtttgtttggtttgtttggttttgatacggaagctccccctgtcacccaggctggtgtgcagtggtgtgacttcggctcatggcaacctctgcctcctggactcaagcgattctcctgccttcagagtagctgggattacaggtgcctgccacaacccccagctaatttttttattttatttttttagtagagctggggtttcaccatgttggccaagctggtcttgaactcctgacctcaagtgatccaccctcctaggcctcccaaagtgctgggattacaggcgtgagcctgtgcacctggcccccatgataatttttatcacatgatgttatccaaggatgacgccataaactgatagcaatatagggtaacatttacacctttcatgagcaaaatgaggggaaataaagatgctctgggaggttttcaacaagtgaaatttactcagtatgaagtattgaactttatttgatccagatcaataaaatttattgagcacattctgtgtgccaggcactcttctaggcattgatgaaaacagaatagttgttctcagagagttcttattatagtggggatagacagacaataaacaaataaacatgaactgggttcagtagcaacaagggccgtaagaagagcctgcatgagggcataaaggattcagtagaggcctagcatcgtggctcatgcctgtaatcccagcactttgggaggccgaggtgggcagatcacttgagttcaggagttcaagaccagcctgggcaacatggcgaaaccccgtctctacaaaatgaaatacaaacattaactgggtgtggtggtgcacacctgtagtcccagctactcaggaggctgaggtgggaggatcacctgatcccaggaggtcatgactgtaatgagcctagattgtgccactgcactccagccttggtgacaaagccagaccttgtctcaaagaaaaagaagagagaatgcagtagagttagggaagtccatgccaaggaggtgacaatttagcagagggttgcatgaatagaggaggaggtaagccttgactatatctggggaagaatgttacagggaaagggaatagtcattgaaagtccctgaggaggccgagcgctgtggctcccgcctgtaatctcagcacctcgggaggccaaagcaggcggatcacctgaggccaggagttcaagaccagccgggccagcatggtgaaaccccatctttactaaaaatacaaaaaaaaattagctgggcatggtggtgcatgcctgtaatctcagctactcgggaggctgaggcagaagaatcacttgaacctgggaggcagagtttgcagtgggcggagatggaactactgcaccccagcctgggtgacagagcgagactctgtctcaaaaaaaagaaaaaagtccctgaggaaaaaacgacctcatgtattcaaatatgacaaggaggccagtgtgcagagatgagggagagtagaagaaaggcaatgaggttttcaacgacctcatgaaaagcttgttagggccagcatagtttttatttgtactctgagcttgtgtgttttccactacactggtgatagaaacgcctttctttaatgcaaagatggtaaggcagtgttctttgtgttggaaagttattgtgtcgattccttgaaattttttttaatctgatctgtgaaatccagaagtctgggaatgtcaggagacgtctggtggcattctgtaggtgggagtgtcacggtgtcgtaggaagttcaggaatctgaagtctgtgtcccagccatcctctgttccagacatgctgggtgacagtaggcaaggaatttctatttctgggtttcacttttctagtctctaaaattcagagagcagctttaaagaatcctgagccgacgagggcatgaaggacatggaaagcctgagaggaaagccaaggagtcaggcaggtggacttcccggaggaggggacctggggagctgctctgggcaggctctttgtgaagggagagcagccctgctcagtttctccgtggaaagtctcagggttaccatctccgcctcaaatttttcaaaaagaaacagaaatcatggtttttatgttaaatctctccgttcataaatattagcaaccgctttaattaaaaactaaacaaggccaggcattgtggctcacacctgtgatcccagcactttggaagaccgaggcagacggatagattgagcccaggagtttgagaccagcctgggcaacatagcaagaccccatctctacaaaaaaatttttaaaaattagccaggcatggtggcatgcatctgtggtcccagatactcagggggctgaggtgggaagatcggttgaggccaggagttcaaggctgcagtgagccgtgatgatgacactgcactccagcctgggcgacagggcaagaccttatctcaaaaaacaaaacaaaaccacgtgagcccataaaacacatttgtgggttgggtttggctgagggatggcacgttcatttcctggagctgctataacaaattactacaaactcagtggcttaaaacagcagaaattaattctctcgcagttgtggacgctggaggttggaaatcaaggtgaaggcaaggccacactccctctgaagatgctagggatgagcccatcctggcctcttccagcttctggtgttccttgggttgcggccgcatcgctccagcttctgcttccttgttcaaacagctttctccatgggtctccgtcctctcttcttataggactgtcagtcattgcttttcgggcctacctcatcttaactgaattacacctgcaaagactccatttccaaataaggtcccattcacaggtaggaggggtcaggacttgagcctgtgttcttgggaggacagaattcaagccaccatgatggatatgacctctattataaattattcagtatagagactctggcctaggaatctgggaaccaccgaatgattaaaagctgctctgtaaagtttacaaaatctgtctctccaggaagtgaatgatgaatgtgagagagttcatacgggtttccaaacaggattgtcctggctgcaagacccaggtcaagtcagacacattctagtcttcagaacagtgttaggcggtgtatttgtttcctgggatggctgtatgaaggaccacacactgggtgacacagggcaacagaaatgtgctctctcacagttctgaaggacagagtctgccatcaaaagtcagcaggagctggggaggagggggtggctcacgcctataatcccagcactttgggaggccgaagtgggcggatcacttgagaccaggagtttcagaccagcctggccaacatgatgaaaccccatctctactaaaaatataaaagttagcggggcatggtggcacatgcctgtagtcccagctactccagaggctgaggtacaagaattgcttgaacccaggaggcgggtgttgcagtgagctggatcatgccactgcactccaatctggactacagagagagactccgtctcaaaaaaaaaaaaaagaaaaaaaaaagagtcagcaggacatgctccctcagaaggctctagaaaaggagtcttcctgcctctaacttccccgtgactcccaacaatccctggtgcccctcggcttgtggcagcatcactcaatatctgcctccttctctgtgtttctgtgtcctcagtcattgaattagggcccaccctaattgagtctgacctcatcttaattacaaatgggaagaccctatttccaaataaggtcacattctgaggttccaaacggccatcaattttgaggtgactctcttcagtcagtactcagttcaggccgagtgcagtggctcatgccgtaatcctagcactttgggaagtcaaggcaggcggaccacttgaggtcagaagtttgcgaccagcctggccaacatggtgaaaccccatctctactgaaaaaagaaaaaattagccaggcgtagtgtcacgcacctgtagtcccagccactcgggaggctgagataggaaaatcgcctgaacccaagaagcagaggttgcagtgatcggagatcacaccactacactccagcctgggtgacagagtgagatcttgtctcaaaaaaataaagaaggaagaaaggaaggaaggaaagaaggaaggaagggagggaggaagggaaggaaggacccagtttattcacccaataccagttctcttgtctccaaggtctcttccatctgcctgtctctgtgactctaactttcctatctttccttgagagtctttgctggcctttccattcagccattttcttaaggaactttcatcaacttccaaacgcccccaccaatctaaagctcagcttcagctggaaaatgtcttagtggcaaaatggtttagggaggaaaaaaggctttatttcttctgatatttttaaacccgatagctcctcactttgagactttaagcttcattgaacctctctgaaaatctacctcctggaatcatgggatagaacatacaggggaggaaaagcaaaccgctttttcactttctatgtcccagggaataaaggacttcaagaaaactgcccttacctttccagccacattccacaatggccttttctaaccacagttctttatgaatctcctttccatcacatctctgatgagtctttctattgctttgcatgacaaaatacaccaaatcctaaacttgttcttgtgagaaaatggaaaagttcacaaggaaagaaaatgacctaagatgagtgagcaatggtattcaaaaataaggagattagataatgacgcaattagagtccatttctatggttttctataattctgaacatttgctgacgactttgactggtttggtatttattcttatagcacatcaatttaaaatcaccctctgtgctctaagaggaatgataaattatgaagaaaatatgttcggaagaattttttagtgggctatctgatgctgacctgagatgttattatgaggccatccaatcattctgggtttttttaattctatcatttgcattccaagcattttaaatatttaaatggcctttcttcttgctccttaatgagagtttgtttgcatttagcacataataactgactagaaatggctttcttcttcttgtgttctcaatccagtggaaatggggaaatcagtgaggaaaccaatgttgtcaacccaaagagagacggtgatgacttaaagttgggtggaagtgatgagaaatagttgcatttgggatgtatgttcaagttcaagccaacaggattttctggtggcttggctgtgaaatcttacaaaaagcaatgagtcaaacatgttattacaattctgaatgaggtttttataaagtcagagctacaggtcaaaggcaccaggttcctagggccaggatctgagtgggcttcagatggggcctatgtagaattcttcctagaccactgattaccattacagtaacaactccaggttggcttcctattaaaaacagaccagatcaccttggattatatgactgcttcccaaagtgtgatatacataatacatgtactaataggaagcttttatgttttacaaaaacctatttattttaacttttattttagattcaggggtacatgtgcaaatttgttggtttgttatataggtaaattgtgagtcacaggggtctggtgtacagattattatgtcacccaggtaataaacgtcgtatccaataggtagtttttgcatcctcaccctcctcccttcaccctccagtaggcctggtatctgttattcccttcttggtgtccataggcactcaatgtccagctcctacttatgtatgagaacacatggtattggtttttctgtttctgtgttacttcacttaagataatggcctccagctccatccatattgctgcaaaagacatgatctcattcttttgtatggctgtgtagtatttcatggtatatatatgccacattttcttcatctagtctaccactgataggcatttaggttgatcccatgtctttaccattgtgaatagtgctctgatgaacatatgtgtgtatgtgtctttatggtagaataatttatattcctttgggtatatacccagtaatggcattgctgggttgaataataatttcattatgagcactttgagaaatctccaaactgctttccacaatgactaatttacattcccaccagcggcatgtgaatattcccttttctctgcaagctcaccagaatctgtttttgttttgttttgttttggttcttaagagccatttgcactggtgtgagatggtatctgattttgggtttgatttgcgtttccctaatgatgagtgatgttgagcattttctcatatgcttcttggccacatgtatgtctttttttgaaaagtgactgttcatatcctttgcccactttttaatggggctgttttttgctcacctttgtcagatgcatagtttgcaaattttttcacccatgaggtaggttgtctgtatactctgttgatatgaaaaaaaaaaaaaaaacactatttttaaatagccttatcccaagtcataatccatgaaactatagtttttatgggcatatttttaaaatctattttgaggcatttatttcattgagaattacatatacacatgtgtacatacacacacacatgcacagaaacacacaccagcccatcaaacccaggagtgcatggattattgcctaagggtgagactaactttaaaaaacactggtcaattttttaaatcattaggagaataataataaaattgattctagaatgtggcaaaaattgtgaaggtggcctgcaaatgattgcagattgaaaaacacaaaattatatcaagtcttatctgcatgcatatgaaaatgacaggagaataaaattcaaattcagttagtgaaaaatccttctaatacacagtctatgtacttctacaaatcaaggcgacaaaccagcataaatgaggagatgaaatgacaggatgtgaggggtgatatgagtggtacttattccccaaatgaaataatgacttactaaaggaaagttgagtgaggaaaaacattgataattgtccaataaatctttccataacctcccattagtcatcagagcatttcagtcccttttttacctaggaagggaagtcagacgtaaagcacaagcaagcaattgctgaagccacaccagggaaccacagggctgctgcttttcccatctcggggtgcctatgggtgttctccttccctgtagcatcaagaccatcagatggcctataagcccattttaaattgccatttgccctttttagaactactgggaaacattcttgtgtgcatcaaaattattttttctcctctggccttgggacctcggtcaagttaagttagctcctcattaccaaaaggatttgaaaacagtagttctgggtactaactcctttgccagtttgccttcatttctttatttattatttcagcacagaactgtgaatctcatactctaacaggataggaaatacttatcagataaatacataaacatttgccaattcagtttggtgttaccaagaagtacaaaatgttgtaagggtctatattaatgaggaagccttgccttagaagtcctgggagtcagggaagaccaccctaagaaattgaagtttggggagaagttagccaagtgagaagagggaggaagaacattccagacagggataccaatttgcactaaagctctaaagcataacggacttggtgtgcttgaagaacagaaagaaatttgtcatgtcatgcatagggtggccaactgtcctggtttgctctggactaagaagtttcccaggatgtggggctttctgtgctaaaatcgggaaagtgttggcaaactggaacagatggaccatccttgtaataagcaataagtacagtgatgttaaaccaagctggagagatgagcaggggccatttatctgaatcaccacttgttactgctaggatcctgccatcttgtctgacttcttggggcctcaagataacaaagatattctcttctgcatatcttcccaaaacttagaggcttaaaaaataatttattagtatctctcacagcctaggagttgacctgactcagctaggatgtctcatttagggtctcttatgcagttgcttgggctagaatcacttgaagcctttacttccagttggatttctccactcatatctggtatctcacctagaatggctgaaacaactgagagctagctgggcatctccccttcacctcacttatgttgtgcacactcatgtgcatagccaccctatgcgactaatctggcttcctcacaacatggtggtctcaacacagtcagactccttacatgggccaactctccctagagcaagcactctcagaggcccacagaagttacaaagtctcttatgacctagcttcagaagttacctcttttgcattctatgggtcaaagtgaatcacaggcctaggccaaattcaaaaagagtggaaataggctcctctccatgggaggaatagcaaaaatcggtggccatctctcttcttctatagatgctgtgggtcagtgtgcctcacagaatcgtggtgtacttcactgacagcaagatatgcttggcctcatgaaaacaagcgaggagtcattgcaagtccaactcaaacatgtatagtttgaacaagacttgtgtaagtcaaggcctcattctgatactgcaacattttacagtccctttcaagaaccttacacttgctctctctactgcatcaaggaatactgcctgatgggctagagaaggaccaagcctaccagtgagaccgtcacctcagttcaaagctatctgccttaagtactttcttcttgtgacatgttggggagttctagattcccctgtgactttcttacagtccccaagcaaatcagagctctctcactcggtagcttggaagcaagactactccttggctctctcttgtttatccagaatctatcgactatcagatgtcagcaaactcattctttaaaggacttgatggtaaatatcttagactttcaaggctttgctgtctctgttacagatacacaacctgaggtttataaactttataaaaacaggccactgggccgggtatggtggctcacacctgcaatcccaacgttcttggaggccaaggagggcggatcactttagcccaagatttcgagagacgcctgagcaacacggcaaaaccccatatctataaaaaaaatacaaaaaattagctgggcatgatggtgcatgcctgtaatcccagttactcgagaggctgagatgggaagatcgcttgagctcagcaggtcgaggctgccgtgagccatgatcgggccactgcactccagcctgggtgacagagtgagaccttgtctcaaaaaaacaaaaggctactggccaagtcccgtggccagagtttgctggccctggattagatgcttgtctcaaggtctcagggataagtattctctctttccactacgggaaatgtgaagacaaaatatcctaagatgagagaaacttcagcttttactcggtggttctgttcaaaagataaaaataatagaacctaggccaggcacggtggttcacgcctgtaatcccagcacttcgggaggccgaggcgggcgatcacctgaggtcaggagttcaataccagcctggccaacatggtgaaaccccatctctaataaaaatacaaaacatagccaggtgtagtggtatgcgcctgtaatcccaactactcggaaagctgatgcaggggaatcgcttgaacccaggaggcaggggctgttgtgagccaagattgcgccactacactccagcctgggcgacaaagcaaaactttgtatcaaaataataataataataataataataataataataataatagaacctaatgcagagcacaagctaaatgactagccaaggaaaatgtcattcaaaatctcccacaccttaaactggaagccagaaaaaaaaactcttcaaatttgtactgaatttgtactttaaagccccaacaggttttccccctgtttcagtgtgtctctgaatattcataacaaatttaaaaccctgtgtagtgtttttcacatgacaggagttcaatggcttcatctgaaaattaaatcagtgttttccaaaatgggaaacatacatctctggtaataaatgaaatttgaggtaggatagctaatgaatactttttgtttgaattgtctatttattgatcacaaaacttattgtaatatgtctttaaaaaaaaactgccacatggaacctgttaccttacagatgttgcttaggacaagggaaagaagatatttacattttttaaaagtcagttgatgtaaataaaaccactaaagaaaaataatatgagagatgatatgaggatgtagaaaaaatttgtgagaacagtaaacaaattattctttctcgggaaacactggaataaatgtttcctatcccatcctggctgttcaaacactggcctaaccacttggttagcacaggtaccatgtgggatttttttgtttattttttattttatgttcttcatctctctcacctagcacagtgcttgctacataaaaggcccacagtaagccaggcatggtggcacatgcctgtaatcccggcactttgggaggccgaggtgggtgaatggcttgagcccaagagtttgagacaagcctcagcaacagggcgaaaccccgtctctataaaaaatacaaaaattagccagccgtggtgtcacgcgcctgtagtcctagctactcagcaggctgaggtgggaggatcacctgagcccgggaggtaaaagctgaaatgagccgtgattgtgccactgcattccagcctgggtgacagagtgaaaccctgtctcaaaaaataaataagtaaataaataaaggctcacaataaatgtagaatgagtggataaattaattaagttgtcactcagattattaggttaatttgagtcacggaaaataacctgacactaactcaaggatctagtatttcagatgttcttaagaacagtctgaagtttgcagagcggaagagatgagcttgtttaaaatcagtgaattagaagtggacagtctcttgggatgtctttgccaagcgaagcccaatggtgccataaatcaggatgtctaattgaagcaatgttttaggaattaaacagcaattaaatcaaatgggaaagtttctaagggacacctttgacaccatggggagaaaagtcaaaacaaccccaagagtctatgggaaaaaaaaatggctttcttccaaagggcttgctggttataattatcaaacatatctgtgattaaaaccctctttcttccaaagactttatgatcttaccatagatttccctcctgtaacatcgtgagccaaagcagaaaaatcaccgaagcatcacaaatgcaggaaaccatggaaaaaagacttggaaaggaaatgtgtagcaaaaactttcatcctgccaaaaactagttttgtgaaaccggttctcaaaatagatggtataacctgtatctgtttacccagcgaaagtaatttaaggcatttcagcctcaatgtcaccaacttcaagagaagcctaacttgagcttgaaggttgatggttggagagtgtgtgtgtgtgtgtgtgtgtgtgcacacgcatgtgtgttataaaaggtttatttaaaactgtggtaaattctttcataacagtgtttccaaaaatatgggactcctacctgcaatagaggtgattttaggtaaaatgtgaacaaaaaacaaaggctttcttattttagcagttacagagtcttatataaagcaaaataaaaatatactcaatacatccatgatagtatgaattattgcttagaatgaggtgaagtttttaaagtatgttaatttctctaaaaagaatattaaggaaataattgaacataggagtaactctcaaacatggcaaaatttgtaaaagttgcttcccaaatggctgaggattgtgaaacactgttctatagcacagctaggactctttctaacacacaatgcaaaaaggaggagcttgcatccttcatttaataaaatccaacaaagacagtaaaaagaataatggggcagaaggtagggatgaagaattcacttttcaagttcagattatcccagctgattatccaagtgatcactttgatgatgagattctggaaaaataaacttcactgccaatacttcaccttacaagcaggtgaacactcttctgcatatttaggaaatatttattttgtgagggttcaagagaatggcaattgtgtacatctcatttttaaaataataactattatcattatattatcgctagcattcatttcattagagaatcctctctatcccaaaaaactagaaaccacgtataagaaaatagatactatagtaatgactatgctggtctcatcaattcagactgtattgtgagtccatcctatgcagaatcctgcgtttgtgattctaattcaggatccagcattttgtagctctgtgattttgtgtgactcactcatccacgaaatcttggttgtaacatctgtaaaacagggatgatgattcccacctcagattgataattaaataagagaatgtataaaatatgtacaaaacaccaatcatgaagttagtccacagcacatgttaattactgctagttttctaggcctctccactttcttttcacccccatcactcactttagcagttctactgtacatcaggtctactgtacatcatccacaaagacctcacatacgaaaggtagaaaatgaacccatttgcttgccagtaaatgtctaccactgcctctaatatcatttgctggaatccaacttgtatttgcatcctgaatcattcatgccttcattcaacgaaaataaatggactgcctcctcatgccatgcaccatgcttgctccctggtaaggaaacaagcaattaaatgcatatgtcaggtacaattttcacacagcacaagctccagtgtgtgaaaaatataactggcttcatttttatcctataaattaatttctttcttggagccctcattatatctaaagtgaagaaaatacctcagttactgcagggtctctttggtaaattcagggatttcccacttgccttcacttggattgcttttatgacttaggtgactcaggtagggatgagtcaagggagaaattggcgatttgtctggtcctcagtgttcatttcctccccatgacttttggtgtctgtgtatggtccctactggcaggtagtagggactgctcttcctacactgcatccacagagatgtccccattcccaaatccacagggttacctgctgtcccatgtctctgtccctttgtgggcattgctttctctgccagctctttcttctctgttgagctctgtaccttttttggggacaaggaaaatgttggctgttgcaaaaagctattctaaacctatgaaaatggagacaggctggctcacaccctccttgcaggtggagctctgagggcttcccagtgctgcaagcatgggtctcctttgcccctcaaacttacctgcggaatctttccatgccctccctaggtctagccccacctaggggtaggaggtcaaacttcaaagttctttccagagatttatcccagtatcttactctcttgtgctcctaagaggctctttttcctccccaaatcccgacattccttccctgctggtgctggggtcagggctaagtaaggttacaggctggctcaggaaatgttcctccgaatctgttgtgatttggccatgcccttggcctttgactctccaaaacccaaagttccattcctctgccctcaggttcaggctcctccgtgactatctcccgtccaaacaaggaacggtcccagtggttaaaagaactggagaagggggaagaaatcaatgaagctgtcccaagattatcccaccatatgagccaatgcaacacagagtgaaaacagggacccaaagagagcacagagcagctgcaatgggaggtcagacaagaaatagaagcttcgggataatgacattcaaattgctcttcacgagccctggtggcctttctcaggcactccatggctccccccgggccacagtttcctgtctggattatatcactcagcactgcaggagaccaggatcatatagttctgaagatgaattaatagtaactgctgcacatgtgactgcaaaactgcagactttcatgaccaaagagacaacctggtgtgtggggaaggacagagtcctgtggcttgggtttgagacaggacttctctagctctcagttctatgaccttggccaagtcactgctcctctctgcgtgtttccttatctgcaaaatgggataccgatccctcttttacagggcttttgtgagactatctgtgaaactactttctcaccgggcacagtggctcacgcctgtaatcctaacactttgggaggccagggcaggtggatcacctgaggttcggaggtcgagaccagcctgggcaacatggtgaaaccccgtctctaataaaatacaaaagaaattagccgggggtggcggtgtgcacctgtagtcccagctactcgggaggctgaggtaggagaattgcctgaacctgggaggcagcggttgcagtgagccgagattgtgccactgcactcaagcctgggcaacaaagagaaactctgtctcaaaaaaaaaaagaaaaaaagaaaaagaaaatgctttatctaccagaaagactacacaaatattaggtatcatttttattggtagtctgtcattagcctgaatatatagccctaatcttgagatgtaccctagaagttcttacaaataccctagaagttccataggggtggataaatccatgacttttattttgtaactatttaattgttattaagggcctggtgcggtggctcatgcctgtaatctcagcactttgggaggctgaggagggtggatcacttgaggccatgaaatcaagaccagcctggccaatatggtgaaaccccatctctactaaaaaataataaaattagctgggcatgttggcccatgcttgtaatcccagctactcgggaggctgaagcaggagaatctcttgaaccctggaggtggaagttgcagtgagctcagattgcaccattgcactccagcctggtgacagagtgagactccgtctccaaaaaataataacaataataataataattgttattacaaaaaaaagcccggtttccatttcctcataaacgctccatctatttaagcttgctaattatttcaatcctggaaaattaccaggataaatgattaactgttcccttaatatgatttcaggaagtaaccaaaaagctaggcttcccaaagtaagccagatcctactttggcagtttaacttgttcccaaaccctcttccggatgacatgtgagttccacctggggctctgcatttcacctttttgctattttcgaaacccgaagacatcagaatggtgcccagggaaggcccccagagacaaaaatgcaagaccggggccaaggggaggtgtgagagccgaccagatttcccaggagctgggagaggcagagatttcttccagaaacagggaaatttatgtggggagcacacagttgggagccgtgagccagttcttgcttacaaatagcaggaagaaactagacggggaagaaaggaagacattcattactgaaggcgagggatttgactgggcctggaaactccaaaactgcagccccaaattgcttcatgaacgaagccattcacttttagccacacgcagacccgtttatttagatcaaattaagatccgaatacagcaatcttaatcatttaattgtttggtggggagagcatcatatagtctgtatcttctttgtttatggcttcaccttgacgagctgtgtctgtgactcatgcattgggtttgccatccactgtcctgacgtctagtccctgcctgaccacttcccagctgtgtgacttcagcaaggggcttgacctctttgggcctgtgttcaattttataaagtgattgtgaggcctgcttcacaatcacaattaaaacttgaagttgtaagtaaaaatgccccctgaccaaaaatgagataaagcaataatgatccaggtggtacctgcattacttagtatcctcagtggtttttttagacatcaatggaggatatgtctaagtctacaattaaatgacattgtactttctcattttaaaacataaaggagtcggctggacgcggtggctcacgcctgtaatcccagcactttgggaggccaaggcgggtgggtcacgaggtcaggagatcgagaccatcctggctaacacggtgaaaccccgtctctactaaaaatacaaaaattagccgggcatagtggcgggtgcctgtagtcccagctactcgggaggctgaggcaggagaatggcgtgaacccgggaggcggagcttgcagtgagctgagaccacaacactgcattccagcctggggacagggcaagactccgtctcaaaaaataaaaattaaaaaatgaaaaatcaaaaataaaacataaaggagtcaacccagatctagatatatggggaaagcatgccatgtatagtaggaataatataaaaacaggaggcggaaaagagttaagcctttcttaaaagggatttttttttctctttggaatgtcatattattgacttatgatatttcagtttctcagaattggaaaataaaggaaaactcagaagtgagtactgcacagacactggctaagtatatatttgcacccccacagaaagaaaaaggctaatggagatactggggcgccccaaaggatcactcacgcctccctcggtgtaggaaacgcagatcacagccatcagatggtgaaaggacaactctccatacttagcagtcatgggaagaatgggaataccattctcggtcgtggggcgtgacagccttcctcataattcttccttaagaatctttatcttatcctctgtcgccctggagatgtttttaaggtcgctgttagggctccagttttaacccagggttcccaagccaagctctaccccgttaggcagtacttggtccacggggagcttcattcattcattccatcaatttgatttaactccttctgagccagggaccagggataacaacgaggaacaaagcccaggccctgcctaaggcaagaaggagcctggaactttcgagaatctgaaaagaaagctggagaggctggaatctagtgagcaaagcaggagagtggcccagacaagcctggagagaaaagtagagaccagatcactccggacacaaagatgatgtcccacctgccacaccggacgagggtgttagacccatagtctcaaccgcaccttcatttttaagacagcattccaattggctattccccctgcctccaaatgagcctggctcctccactggagaaggccaggccctgggtctcacacagtatttagacagaactcacccctcacctcttagcgtggcctgagagcctcagctgcaatggcaaggctctgtatttatataacaagccctgctcaagtatttttaggcctactgtttagaaacacacagagggggcaagaaagagaataaatatggaaatcaaatgtaaaaacttctggctcttgcaaccggcttcctgggggaatattcctctgtgttctttccacttcttctactcagcggaatgactgctagtcattaaggaaatctgtgaggagctcacggtacaggaattgtacaccaatgctcccatcctcatttgcatatcccattttttgattggcagctgtacatgaaatgccatatcagttgaaagtatgttgtgagctggcactaatgatcctatggctccagggaagcctgccatattgtaatttggctatcaggcatgaaagaaataattctaagtgccaggaatgcaagactgaataaatgtttcactgctgcaggttgtcaagggcgacacttctgatttagtataaacgaatgccccgttgcctttggggtaccgggagtttgcattgtatctgagctgtgtgtataaaacattagtctaagaaaatggcttcggtgtaagatgggaaacagaggcctgctcccagaaggcggcggaatgtttacaactaatcactggatgaaaggattttgctaccttctataatgacaggcaaacaggatttgcttttcctgagatggagaataatggttatgttaactctgcctcacctagcctttttttttttaaatgaaatgctcttttgtaaagaaaatcacatctgtttccttttatatatgaaagggatataaattctttttctttccctccctctgtgtgaatagcccgtggtgtaccttggaattaaccctttctgatgtcctcgggtttcagaggtctggaaacatgaccaccacttccttctccctggctcctgacttcacacacctgcctagacagagagcgtctttagaagtggacagcgatcgttttcacttgaattttcactaagatcccaaagccaattcccggcataccgagctccacgggatctcactttccactaacaaacttcccgagcgttcactgtatgcaatgtagaaaacagtggtctaaaaagcagtgcctccctagaagaaatgccactggaagtttcttcctagctgtggcctctgttgaccatctgggacctggcttcaggatcatcttaagatctgttttattttcccttgattctatgtggggatattctttgaagatggtttccaccatgtacttccttgcttggatgtcactaaagtaaaggctcgggtacctgtttagacatgacagaacagcagtcacaggaaaagaccatttttccatttgttctctaggcaaaggccagctggggtaaatcaagactgggctggggagcacctggacctcttttgctctcaagtcttgatttgggaagaaaccaacctgacacttggactcccctcttgaagtgaaacttcattattgcctctcgcctacagttgaagtgaaactgcattgttgcctctcgcctgcagttgaggtgactctcaggtgggcttggcaagaatgggagtgaaaatgataacttaaaagataactaggcgggcatggtggttcacgcctgtaatcctagcactttgggaagctgaggtgggcagattgtctgagctcaggagttcgagaccagcctgggcaacatggtgaaaccctatctctactaaaatacaaaagaaattagccaggtgtggcagcatgcgcctgtagtcccagctactcaggaggctgagacaggagaattgcttgaacctgggaggcagaggttgcagtgagccaagatcatggcactgcactccagcctgggcaatagagcgagactccatctctacaaaaaaaaaaaaaaaggataactaagtgtatggtcagatggtcagatttactcatccctatcaaactgacgcaggagattcccatcatagcaatcccttcagccattccactgttgtagattgtgtcatagggttgtaatacaatacacagatcccataagagacagcatcttacaatgtttctcttcagtaggtgaagaatttttaaattgtaggtggaggacactgaagatactgttcattcaaactcacatttcttgctccttcacttaaatgacacacaaattattgggtattcgctctgtggtgggctttgggggtataaaaataaatgaggcaggtcctctgccctcgagtaagtcatagttaacaggaaatgcgcatcaaaacataaaagcaaccacatctactgtgatgatacaacactgaaggtgggtgaaacccacagtcgagagcctgacagtcacagtcgcaggagaaaatgccagttgaacatactcacctctttaactttcttcttctacttttcttttttttctttctttttttttttttttcttgagatggagtcttgctctgttgcccaggcgaccttggctcactgcaacctctgcctcccaggttcaagcaattctcgtacctcagcctcccaagtagtcggaattataggcgcccaccaccacacctgcctggctaattttgtatttttagtagagatggggtttttcaccatgttagccaggctggtctcaaactcctgacctcaagtgatctgcccgccttggcctcccaaagtgctgggattacaggcatgagccaccacacccggctgcctctgcaagtttcaagggccagcttaaatttaggtttaaattgtgtacccactacatgccaggtacaatatttagctactttcacttatattatgtagtttaattctcttccagtggatgattattcattgatattaagattacagaggttcaatattaagagaaaatgaagtaaaccttgcaggcaagcaggaacatactggaatgtgtgaccttttcctcatcagttatgggagattttccaaaagtatgaatgtctgaaaacccaaacatctacagatagggtcccctcctagtgttcctttcttccaggtaatccaaaacttctcagaacatcagcactcgtaaaaatgaccaaacagagttaactctgcaatatcattcataccacattcaaggggaatttcagagattttctaagtgtaactgggttatgtgtagttttcacttaagcccggactcgaagctcaactcctacacgattgtgtctctattgcttgttgaaagggtgatatatgttcagaggaaattgtgtctaagtccacattaggcctgaaagagggatggtcatggaagacttcattgaggtggtgattttccagaatgcatgaattaggagaggaaattccaggcagagtggccaagactagcaaatgctaggaggaggtgacagagtatggctggctttgggttgaaagactagaagaaaagtagtggcagaggtgaagttacaacagtaggcaggtggccatgctctgctggttgatgttattgtgttgcctacccgcttgctttgagatctccagacctgtggttttcaacagggagatgacttggcccccaggggacatttggcaatgtctagagacatgttggttgtcacagttaaggaaggggtgctactggcatctagtgagtagaggccaggaaagctgctaaatatcttacaatgcctgggactatccccgacaacaaagaattgtccggcctgaaatgtcaatagcgctgaggttgaaaaagccttttcgtctagaccatggccacttattttcatgctgttctggtgtcatggaggcaaatgcaaagcaagtttaaactttgtgtgttggaataaggatgtctcaggacaaatatttatttggaatccctgttccttttgagccagggaatagggtggggaggcagcagagagagcgactttagggagaaatattaaccttgcaaatgtgcgcattttcaattcacatcctagtgacaggctacaacttgtaatcagtataaaatgattttccgggagagtaaatgcttattttcactgtcttgatgttggcactggattacttggtattaatcccagggtgacagagtcacatttggaagccgtgagatttatttggatgtctcgcagggccaggggcagccttcattttacatccttgatcttggataatttaaataatagagctgcttttctgtatacactagtggtgtgaaaaggaagttatccacctaggacatattccaagagccacagaaagccagggaaggaagaagagaggataagaatgtctccatatttattgttatctccatgcttagcagcagcaactattattacaacaaacaatgaacacttattaaacaccgactgtgtgccttcttccctggcacaagagagcaagaaagtctttgctattgtgagcagtgctccaataaacatacatgtacatgtgtctttatagtagaatgatttgtaatcctttgggattataatggacccagtaatgggattgctgggtcaaatggtatttctggttctagatccttgaggaatcgccacactgtcttcaacaatcgttgaactaatttacactcccaccaacagtgtgaaagcattcctatttctccacatcctctccagcatctgttgtttcttgactttttaatgatcgacattctaactggcatgagatagtatctcattgtggttttgatttggccagcaaaatttgttaagggaccagagagtaaatatttttagctttgctagccatacagcttctttggcaactactcagctctgatgcaatgtgaagcagccatagataatatataaacaagggagtgggactgtgttccaataaatctttatttacaaaaacaggcagctgggccagatttgtcctggaggttctaattcatccgctcctgatcaacagcatatactacacttttgttttgttttgttttgttttgttttgttttgttttggtttggtttgagacagagtcttgctctgtcgcccaggctggagtgcagtggcacgatctcggctcactgcaagctccgcctcctgggttcacaccattctcctgcctcagcctcccgagtagctgggactacaggcacccgccaccacatccagctaatttttgtatttttaatagagacggggtttcaccgtgttagccaggatggtcttgatctcctgaccttgtgatacacctgcctcagcctcccaaagtgctgggattacaggtgtgagcgacagcaccaggccgttttttttgtttgtttgtttgttttttgtttttgtttttttttttttacaatcacagctcactgcagcctcaaactctggggctcaaacaatccttccacttcagcctcctaaagtgctggaattacaggcatgagccaccatgtccagcccagtgtactattttaaagacattccttctgaatatttaagcaatgatattaagaatggcaaaatagccgagcacagtggctctcgcctgtaatcccaacactttgggaggctgaggtgggtggatcacctgagatcaggagtttgagaacagtgtggccaacatggcgaaaccctgtctctactaaaaatacaaaaattagacagacgtggtggtgtgcacctgtgatcccagctagtggggatattgaggcacgagaattacttgaacctgggaggcagaggttgcagtgagccaagatggtgccactgcactccagcgtgggtgacagagagactttgtcttaaaaacaaaacaaacaaaaaaagaattagtaattttacatctctgaatctagtcctaagaatatctttggctttgcacatacaaatttttgcacaaatatgttcactgtggtaatacttagaataataaagacatggaggtaattttattggtcaatgatagggcatcagagaaatcttgctctgtgatggagcaatgaaatattgggcagtcttagaaagtgatcattctaggccaggtgcagtggctaacacctgtaatcccagcaccaaggcaggtggatcatctgaagttgggagttcaagaccagcctgaccaacatggtgaaaccccatctctactaaatacaaaaaattacctgggtgtggtggtgcatgcctgtaatcccagctacttgggaggctaaggcaggagaatcacttgaacctgggaggcagaggttgcagtgagctgagattgtgccactgcactccagcctgggcaacagagcgagactctgtctcaaaaacaaacaaaaaaaaatgaaagtgttcattctgaagggttttcatggtgtacttaagatgtaatattaagtcaggaaaagtgagatagaaattgtgccaacagttttgtagcaattaagtataaatccacattgcatggaaaaagagtaggaggaaatataccaaattgttaaggatggtgaggctatggggtgacttttcttaaatttaattccaacatggattctttttagcattgtattcattcttttttattttttaaaaaaacttcatctatatttctttggggtacctatgcaggtttgttacatgggtaaattgtgtgtcttgggttttggtgtacagataattttgtcacccaggtaatcagcataataatgcaaaagtagtttttcttttttttcttgagacagagttttgctctgtcaaccaggctggagcacagcggcatgatctgggctcattcaacctccacctcccgatttcaagcaattcccctgcctcaacctcccgagtagctgggattaccgcatgcaccaccacgcccagatagtttttgtatttttagtagagaggtttcaccatgttgcccaggctagtcttaaactcctggcctcaagtgatccacccacctctgcctccccaggtgctgggattacaggcaagccaccacacctggcccaataggtagtttttcaatcttcaccctcctcctatcctccaccctcaaatatgcttcgatgtctattgtctccttctttgtgtccatgtgtactcaatgttcagctcccacttataagtgagaacatgcagtatttggttcccttgttcctgcattaatccgcttagtataatgaccttcagctctacccaccaacataaaattattaaaagagggcaagtgttggcatccaacagatttagctttgcagttctctggctaagcaggtgaccagtgcaaggtgacttaagctgtctgagcttcagctcacttctttgtaaaacacatgtagcatctgactttccagattgatgggaagattaaatgaagtaatgcacataaaacagccagcagagtgtttgtaacatagtaggtaccaaacacattgtacctgttaatatcattattctgtttgttccaagcagtctgtatcttagtttcggtggtgattacataaatctatgcaagggacaaagttgcatagaactacacacgcaaacacacacacacacacacacacacacaaattgtaaaaactaaggtctgtagtctagttaacagtattgtaccaatgtcggtatcccggctttgatattgtactccagctatttaagattgacgtctccacggggagaaactgggaggttacataggactctactatttttacagcttcctgtgaatctatgattatttcaaatgaaagagtttttaaagtacagtaaaacttttttaaaaattctaacgacttccataatttgcatctcatctattcaggtgaggtaggaaaagttaggaatggtttgttattatttataaaaggaaaaactgacagagtgactggttgctcttctccaggtcaatcagaaaataagaagaaaaagaaaagccatgtcactgaatgttcaggactttttaacggttgctgatcctgcctcaaaagttgtcctgtgtttaatgggatttatattccctcaataaggaatgtgacctctgaggtttaaggatagacctgctatctcattctttagatgtatgtaaaaggtggtcaatggacaaggatgtcagaacagaacatagaatcccatgaaccgatgtccccagttgaggtttggaataaggcaaagcaggaacaagtgactgtctcaaagaaaacaataattactcaagtgtttacatgtgcttatcagttttattatttttatgtgtactattaaaactgaaaataagttgtctataaattaagaaaactggcttaaggttgctacagttacaactctccttgcaaaaactcaagtcactaactcaccaaatatctgctaaatatctgccatgtgcagttactgttctggatgttggagatgtgataatgaactagacccatccagtcctgctcttcaggaatgtggtttaggtcaaaaggcaattgattagagcctgccttttcccacttgcttgccatgtgcttttaacagttgcctgggccttaatctccttttcctggccttatttatatagcaatgacaaacacacatgttcacttaccagccccacctcttgcattcaaagcaaacatcactaatcaatctgtctcaaaaaaaaaaaaaaaaaaactgttcttcaattgcctttacctatctgattctctcaaagctccactcatgaaatcccacctgtcccccagaactcaccaaaaaaaaaaaaaaaaaaaaaaaaaaagatccaaagtcccctccacatgcagcctccactggctctgttcctctttgccacttcccactcacctccttcttgccttcccatgtctctgctctttcttggatttaaacaacaaagcctagaagctgcgctagtcaagccaagttctcttcagcatgcggggaaggtagaggagctttaaagtggaggaaagtagaattcagtcatgtgaaatcaaaggtgaaatgataaaaagaataaggacagagcacaacccaccagatcaatgaaataatgtctgagaaagcacttcaaagagtgtccagcacaataaaaatagattgtcctggagaagcagtttctggagtaagaaaaatgtgacttttagatggatcttgaagaattaatggaacctggacctatggaattagagacgatgagtaagcaaagaagaaggaagttgagatggcagtaccagcaggagaaagattctgtgcaggaaagggttgggtgtgttcaaggagcctgcatcagtctctaaactgaggtttcctacgtttatttcctgtctgggacattctgtgacacatgtccaaatggaaaaatcattctccattgagctagccaaatatcttcaataaataatgcaaaaattattaagacattttccagaggaccacaccatttcctgtcttgacaatggagctggatttgacatcagctaattcaagaggttagaaataaaagctgtggccaattcaaacttcccttccaaatgtttttcaataatctgaaattggtccaagagacaggacttgtaatcaacttttttcaaaccatcttaacatctttcatgaagtcatgaacatgaccgtgcagacgtgccattgactaattattgtcctggattgtgggaataggaaggaacattgaaataaacgatgacttcactggtcaacctatggaatgttaaaagaagagggagctaaagggaagatgttccaatagcatgcaacatgaccttggggtaatgagatagacacacattggaaagttttaagcgtgtttgtttgtttgtttgtttgtttgagatggagtctcgctctgttgcccaggctggagtgcagtggcgcgatctcggctcactgcaggctcctcttcccaggtccaccgcattctcctgcctcagcctcccgagtagctgggaatacaggcgcctgccaccacgcctggctaattttttgtatttttttagtacagatggggtttcaccatgttagccaggatagtctctatctcctgacctcgtgatccacccgccttggcctcccagagtgctgggattacaggcgtgagccactgtgcccggccattttaagggttttaatgagaataatacaaaatatccagctcacatgtacgtatcgtggttctgatgcaccagctgctattctaagctgttgacatataccatgtagtttattcctgacaatgaccctgaaagaggcaggcacttattcccattgtacagatgaagaaactgaagtggaggaagttaagtaacttgtccaaggtcacaccatcaaaaaatgaaacagtcagcatacaggtactatctctccaaggaacctccagagacaccaatcaaaagagaatgcatattctccttgcaatcccatcagttaaaaaagagagagagaccaggtatgggtggctcgtgcctgtaatcccagtattctaggaagccgaggcaggtggatcacttgagctcaggagttcaagaccagcctgggcaacatggcaaaaccccatctctacaaaaaatacaaaaatcagccaggtatagtggctcatgcctgtagtcccagctactcgggaagctgaggtgagcggatcacttgagcctaggaagttgaaggctacagtgagccaagatggcgccactgcactccatccagtctgagtgacacagcaataccctgaaaaaaaaaaaaaaaacagagagagaatgctgagaaaatcctgccccaaatctctaaaaattaccaaggcaaacatgtagaaagctgaaactggatcccttccttacaccttatacaaaaattaattcaagatggattaaagacttaaatgttagacctaaaaccataaaaaccctagaagaaaacctaggcaataccatttaggacataggcacgggcaaggacttcatgtctaaaacaccaaaagcaatggcaacaaaagccaaaattgacaaatgggatctaattaaactaaagagcttctgcacagcaaaagaaactatcatcagagtgaacaggcaacctacagaatgggagaaaatttctgcaatctacccatctgacagagggctaatatccagaatctacaaagaacttaaacaaatttacaagaaaaaatcaaacaaccccatcaacaagtgggcgaaggatatgaacagacacttctcaaaagaagacatttatgcagccaacagacacatgaaaaaatgctcatcatcactggccatcagagaaatgcaaatcaaaaccacaatgagataccatctcacaccagttagaatggtgatcattaaaatgtcaagaaacaacaggtgctggagaggatgtggagaaataggaacacttttacactgttggtgggactgtaaactagttcaaccattgtggaagacagtgtggcaattcctcaaggatctagaactagaaataccatttgacccagccatcccattactgggtatatacccaaaggattataaatcatgctgctataaagacatatgcacatgtatgtttattgcggcactattcacaatagcaaagacttggaaccaatccaaatgtctaccaatgatagactggattaagaaaatttggcacatatacaccatggaatactacgtagccataaaaaaggatgagttcatgtcctttgtagggacatggatgaagctggaaaccatcattctgagcaaactatcgcaaggacagaaaaccaaacaccgcatgttctctctcgctcataggtgggaattgcacaatgagaacacttagacacaggatggggaacatcacacagaggggcctgtcatggagtggggggagggggaagggatagcattaggagatataccttatgaaaatgatgagttaatgggtgcagcacaccaacatgacacatatatacatatgtaacaaacctgcacgttgtgcacatgtaccctagaacttaaagtataataaaaaaatgaagaaaaaaaattacaaaggcaataatgcaaccacctcagcacatccaggaagactggatgacttgcccaagattaagtgaagtcaaaaccagtacttgaacaaggattttctcactcccaggtatcaagcaatcccctgagcattcatttctcatctggacatgagaaatgtgcactggacatccaaatacctgcttaccaaatcatcgattatctgccaaagctcttcagcaagtaatagcgttgtaaaaagtattttataattaggagtatctgaagtcagaccaactgatttgaatcagcattaccatttattaacagttctatcaggccaggcacggtggctcatgcctgtactcccatcatcttgggaggctgaagtgggcagattgcttgagcccaggagttccagaccagcttgggcaaaatagcaagacaccatctctacaaaaattgtttaaaacattagccagtgtgatggtgcatgcctgtagtcccagctactcaggaggctgaggtgggaggatcgcttgagcctggaaagtcaaggctgcagtgagccataattgcaccactgcactccagcctgggtcacaaagtgagaccctgtctcaaaaacacacaaaaaagttttatctgtggataatttagatcctgctcaaattatcagtttttttcaccagtaaaatgggaataatcatcatagctatttcatgggattccggaagattaaatattatgcatgcaatgcatacactgagcaccatcccttacacatagtaagtgctcaataaatattcaataataataataaggaaatcatagccacaacatgtgttatgctgtgttcattacaataagactgtgaaacctattttgatgaagcaggccattatagcttgagtaagaaataaaataggcaaacaccagaactttaacctaacaccatgaccactcccaaagtttagcatattactggaaatcgctaacggagcactgcccattattcatgatatgaacagtaaggaatcatgcataatggaacagagtccctgctaacagcagattcacacacgataatttaaacttgtttgtatggaaataaaggacgagtctttgaagtgagccttaatgagattctgcttgatctttggtgtatcctgggagaaagagttcaatttttcctccagcatctgactcatgttggtggcgtgcaggaaagaaagggctgacttaaattatgaatggcctttcttgtctttgtgatagcaggtgaggagggtggcactcatccgggggcactggggagatgcagggagacaatcacagttctccgaggtggcctctgcatctgaaacttagaggaaggcttggtgggctggagcctcggaaggcattcgtcatccagaaggatgctttacagactctgaagaagcaaaataagctggtgggctctggcaggagacgcagaggtactagtgtggccccgcaccttttcaaattctgcttgtgcatgaaagggattcagctccatcccaagctcatgctggaggagacctggcaagcagtcgccttgccagtcgctgctgacctggctgctgaccaactctgaagagggctcggtgtttgctcaacgtggcctggctgtcagaaggtcccaggaagtgggttgtgttttggttgccaaatgcaagagagtatgagttttgagtttttgaaatcagttcaagtcatgggacaggtctacctcattaagtggccattagatttatgatgaaaagatgacgactgtggagtgctgtgtacaggctggccactcactgtagagtgcagagtatagactggccactcactgtagagtcctgaccacaggctggccactcactgtggagtgctgagcacagtttggccacatactgtagagtgctgagcacaggctggccactcactgcggagtgctgagcacaggctggctactcactgtagagtactgagcacagcctggctgcacactgtaggatgctgagcacagcctggctgcacactgtagggtgctgaatacaggctagccacacgttgtagagccctcagtgcctgctagatgtcattttatttttctttttacctttatcactttgagggctttttcaagtctatggtctttcaggctcaattaattgtaactaagcctctgagacaaagtgcttgttgaatgtcttccactgttccgacacagaaacgcagcataagtcgaagttgcaatggacagcatacgtcgaaacttcctctgtgccagactccttgtggggactctcttctcatcgcctcctttagtcctcaccactgccctatgaggaagaatgtgctttttaacttcattttacagatgagaaaactgaggcccataaggcgaagttactctctcaagccagtaagcagtaggaattgggatttgcactcagcacccatttgatcccggagtccgctttcttgattgtactctctactgcctcaccttcaatggcttcctctaatggaaaagcctgccctcaccctaatgaatactctcagctgggcacagttaagggatgacctctgtgcatctaatgagttcatctcaatccctccccagggtacagatgtgttgtgtaacttgggcatcgggaagtccaggacggagcaaaacagaggagggtgctctcccagacctgtatcatccacctccgttatctcccctcacacagactcaagaattcagatcccacctatgttgccttggtattctaacaaacatctctcatgtttaagctaacatgtcctaagcattatgttaagagggtttcatgcattcaatcatgtagaacttttattcccatttgaccaatgaggctcctgaggctcctgcaagttaagtaaccagcccgagaacacacagcagctgcctggtgtgtcaggacattcctgcatcgttggtgtgatcgatgcatgcttacctctgtgtgcctgaggcggtgctctgtttggggacactgcagtgactgagacagatcaggtgactgccctcagggacctacactctggaggggagacacaggctaggaacaaatatacaaattagacaacacagtcatgtgtccagtagtgacatttcaatcaacaataggctgcacataggacagtggtcccataagattgtaattctatatttttactgtaccttttctatgtttttaattatactttcttttttattattttgttttttatttcaataggttttgggggaacaggtggtgtttggttacatgggtaagttctttagtggtgatttctgagattttggtgtacccatcacctgagcagtgtacactatacacaatgtgtggttccttacccctcactccttccaacccctcccccccgagtccccaaagtccattatgttgttcttatgctgttgtgtcctcatagcttagctcccacttataagtgagaacatacgatgtgtggttttccattcctgagttacttcacttagaataatggtctccaattcacaggtttctgtgaatgccatcatttcattcctttttatggctgagtagtattccatggtatatatacaacacattttctttttttttttttttttttttttcttcagacagagtcttgctctgttgccgaggctggagtgcagtggtgtgatcttggctcactgcaagttccgcctcccgggttcacgccattctcctgcctcagcctcccaagtagctgggactacaggcacccgccaccatgcctggctaattttttgtattttttagtacagatggggtttcatcgtgttaaccaggatggtctcgatctcctgacctcgtgatctgcccgccttggcctctcaaagtgccgggattacaggcgtgagccaccgtgcccagccatataccacattttctttatccacttggttgatggacatttgggctggtctatatttttgcaattgcgaattgtgctgctataaacatgagtgtgcaagtgtctttttcatataatgacttcttttcccctgtagtgggagtgctggatcaaatggtagatctacttttagttccttaatgaatctctacactgttttccataatggttgtactagtttacattcccactggcagcataagtcttttctatgtttagatgtatctagatacacaaatactcaccatgggtgttgcagttgtgtatggtactcagtacaggcccatgttgtacatacttgtagcctaggagccacaggatataccatgcagcctaggtgtgtaggaggctatgccatctaggtttgtgtagtatgctccctgatgttctcaaaataatgaaatcacctaaggatgcatttctcaaaatgtatccccatggtttagagatcatttctatgaaaaaaagcagcagaaagaggcaaaagaaggcactgaggggaaggatgtgttagtttcaatggggtaaccaaagagatcagcctgagaaagtgacattcgatgcctgacctgaatgagtggagggaggtggaggaaacacatgccaggcagtgggatgcttgtgtgcagagtccccggggcacaaacaagttggggaaacatcaggaaggtgcttctgccccaagtggggtggaggaagtgagtgagtcagaaaggagggttgcactcagccacatcaaaccgaactttgattctgcagcctgttctcctacccaccacactgttcagctcccagggctgcctcaaaaacatcaactcccaaatttcagcttttatttcagatacacggggtacatgtgtaggattgttacctgggtatattggaccaaggtagtggacgcagtacccaacaggtagtttgtcaacccacgctcccttccctcccgctctccagtagttcccagtgtctgtcattcccatgttaccaccgtacatgctcagtgtttagctcctagttatgagaacatgtaggatttggttttccattccttcattaattcgcttaggatgatggcctccagttccatccatgttgctgcaatggacaagatttcattcctttttatggctgcatagtattccatggtgtaaaataaaagctgaaatttaaaaacaactacctcaaatcacttttagattgaggctccataaataaatgaaattaacccagattacaacaaaaaatcaactcctgatgtccactttacctgaagtttctctcttctgcgggttccccaagtctctttctttttagattattaccaaatgtagataccctggaatccattctctttttaaataatttgaattaaactaagataaatgtccaccaagaagtgaggagtagagaactctgtgtgcagcatccacatctggtctgtgtcctccttcatgttcacggatggctctgctgatggaggccaccctgagtgtgtgtgcggtacacatgccatgagaaaggggtgccaatgtggctgctcacacacagaaacgcttccatctctgagagctgtcgaatgagagaatgtgctggtgcttttatactgaagcatatcaatagtggatttgtcaaactagccccgtattcaggtgcgagtcttcagtatttccagctgaaggtctgcggctcgtaggctctgggcatcttcccctcttctggcacagtttggcttcttccttctgctgaatggatgcattctttacacttttgattactaaccacagccgtgagccaaaacgttataattaaataaaataaacagatcctgggatgagtctttgaggaaaaagcagtcttttaataatcaaaatcttcatgcattttatttcatcattatgctaagatgttgagagaaatggatttctagaatatgacctggccctgactttgtgtctagtcaattacaagttcgagctaaccacctcaacatttcaaggatggccttttctttttctttttttaaaacagcaggactaaaatttcattgtattgaacataaatgggaaaacgtgcattgcagagtaaaatttaaaatgcttttatggaattttcattataaaactgcctgtaatggagttgaccttatattcacctaagatttctctggctccgagttcagatttcatgccaattaacatgttaatgacatatatcatttaaaaagcccatcataacttttatcacatcatgttacatctatttccttgtaattaaatcagaattacagggtgtaattacttttcttttcctgaatacccattccttttcagacatttaaattcaagtgcaagtactaaaagacacttgaaagtaacaacctaataaaaatattatcagttaatgaaagcgttgggtttctcctactctctggtttctttttgacaaattcctatctccccatgtactttgcatgacatgtaatgattggtcgtatccagtcaaatgcttcctaagctctttaaatcctcagggccctagtctctattaatatgcaacgttctcacacataaatataattacatacaattattagcggaaaaggatcagataaggtttattaacgaaatatcctataatcatccaagtccaagacttccccttacatgctaattcaatgaagggttagagtctgtaatcactacacctgcattgatcactgatggcaggatcaaagaaggggaacacctttgtttaaaagacttaaacaattattttgtagacaattctattatctgactgcttctgttcttccacgcactcttcgacatccaatttaaaacttaaagttggccgggcatggcagttcatccctgtaatctagcattttgggaggccgatgtgggtggatcacctgaggccagaagttcgaaaccagcctggccaccagggcgaaaacctgtctctacaaaaatacaaaaattagccagctgtggttgcgcgtacctatagtctcagctactcaggaggctggggcaggagaatcacttgaacccaggaggtggaggttgcagtgagctgagattgcaccatggcactccagcctgggcagcagagcaagactctgtctcaaaaaaaaaaacaaagttgcatcatacttaattttggaaacttgttgtaacttgaagtagtatctaagaactgggaagtaatcttacaggcgtgtgctgtcctatgatgatctattaggattgtgtgggcagaaccaccggggactgacatatattatttgaggaagtcagcacttgaaggtaggtagaaaacgaactcctttgctgtcaggaagttctgcatacatagatcaaatcactcattcatttggcaaatatttattgagtgcttataacagctaggtacttttttagtcctaggtactattttagtcctggtcaaggtcattgttgccaaggtgccaacattctagggaaagagaacagaccataaactagtaaacagaagaataaataagataattgcagctagtgatgagagacaagaggaaaagatagcagaacaaggtgataaaaagaaatagtggccaggtatggtggcttatgccagtaatgccagcatttcaggaggccaaggtgggtggattgcttgagctcaggaattcaagaccagcctgggcaacatggcgagaccctgtctgtatcaaagatacagaaaattagccaggcgtcatggtgtgtgcctgtggtcccagctactctggaggctgaggtgggaggatcacttgagcccagggggcagaggttgcaatgagcctatattgcaccactgcactccagcctgggtgacagagcaagaccctgtctcaaaaaaataaatacttttttttaaaaaaaagaaaataaatagtggtgaggtggatgattctagacagggtagatgatgaaggcatctctgaggtatctaacttttgagctgagacctaagtagtgtgaaagagcaagagaggatcagggggcacagaaccaccaactatcaaggttataagagggagagagctgatgttttggaagaaaaagagcaggtggatgtgtctagatcaaagggagcaggatcacaaagatggcggtaaaaagatggcaccatctatgtagactctccgggctgccaaaagcttacagattttgctctaagaatgacagaaagcagctagaaggttttaagccaggaggtgacattattcaaattacattttgaaaaggatattctgggtgtagaggctggatttggagaggcaggggtagaacatcagacatttaggaggctgttggtgccatctgggtgagcaaaggaaccagcttaacctcagcttgacctacctgtgccaggacacaggtagagtccctggtatggcaggtggacaagcaagggccactaaacaggcatgtggcagcttgcaggaacccccaattcctcctgaccatttcttgaacaaatatatcatatctaccatgtgccaggcattgttttaagctttgagaatgtagaagtgagcaaagcaggcaacatcttcttcttatgggtcccaaataatgacagaagagcaagtcaggcgatgaaaggtgtattggcaaaaactaaaacatggcgtggggattgggaagaacagggaaggagggagagacaggtactttagattccaggctcagggaaggccacatggaaggcatgatatctgcatagtcctgaatgaggtgacatcaaaatgcaacccaaatgtcaactggtcccacgtcttcctaatccctacattttgcctctgttttcctttgatgccaaccccaaactcagccccacttcagggtctctcactaaagcaccaatgagcaatggggatgtcagaaaatgttcaccagggaaacacagcagtgggggtaacatcatgtgtacagtgacccctgacgaagcctctcccacatttctctagaaaaatcctaaagatttcttttctcttccccgctgcatgtgacctccagctttcttcttgaattcctttcttcttgatttctcttgtttccacaatatctagtcctgctttctgctgcaatgcagagcaattcagcttggcccccaatccacccaccaagccctccagcatactcagcaaaacaatgctcttctgtgaaaaggtgacacagtggtcatttttgccccttagagtttcacctcctcattcctatcacaagtggctcaatatggtatttctccttaaaacactcagtgccctcactaagagaaattcttttgaatgcaattatcaccttgcaaatgggttatggacaggcatgtgcctagaagttccccacttattgagcccagagattcatttccatggaatctcgtggaaatgaagaggatcagaagccacctaagtttgcacagcttcttcctgtccatggttacctatgtttactctctctccacatataaagtcaggctgagatgagaaagtaagggaattcttgccatacatctatggactttggtttaaggcaggggttggcaaactacaaccagtgaaaaggtcttattagaacacaaccatggccttcacatgcaggttgcccatttctgctttttcactatggtgcagaacaaactcattatacagcacaaaagcagtgccatgtgatacacatgggtgtgactgcattccaataccactttacttctggacactgaaatctggctttcatgtaattctcacatatcatgaaatactattctttaattttttccaaccatttaaaaatgtaaaaacaattcttagcttgcagactttacaaaaacaggccacaggatgcatttggcctgtgggtcacagtttgccaccctgatttaaggggttgttaacaaacatgagaccctctgagttactgaatcaatctcagcatcacgaggtctcagcattctggggagaaagcagagctggtgtccggctgtgtctggactccccctgaatccgccaggtggccagtctccagaatgcctgtccttccacagaaatgctatccctttccgttctccaagtttggagtctgagccctttgaggaagggtcctccttcttcatcctgatgtccccagcgttcgacacagagtccagtaccaagcaggtactcaaaccacattagtggagaaaagcaacccaggaacatatgaaagacacagcatcttttgtgtggttctcaagccagtctctaatatcgttaatgcatttgataagataaaatcattacttactagcaaaatgaataattagccatttctcaaaacctagtaggataggcaagaaggaggaagacagggagctatgtgtacataagagtgatatgtctaagtgacttcttgaaatacagagcccattgtccccactctgcagtggaaatccatcgatttccaaatgagttgaggccatttcctgacagttgggaggaaaggggccaaaccgttgggctcctattcgtcttcagcattttacaattaagagctggccttgtttaaagcccaacctgtcattactgttaatattgagatcggacactttgatccgaatggaacctgactgcctgatacaacccaaagttaagctgcttccaaacgtatctttcactctgtatatcatcctagctggctgatgtctgtttcaactgagcagtggggtgatctcacgatggtgcaatggagaactgatgttgcatgaacttttctgctgttgtttcttttccaactgacagcttagccctgcaccctaggccagcctattcttctcgtagagacggtcactgattccctctcttctgattagcctgggcaatgattgggataatttaggacgtgcactgtttgatcatctgtacacttacaacaaataaaacattttaatatgagcagtcactgcatgtttactgtatcatattgctgagagctgaacaaatgccaaacgctataacagaaggggggatgtgaactccagaatgatgacactaataaggaaattacaaaaggcccaacaaatggcatttatgttaaatcaataatgctctgtttgttttttttaattctaatctttcttcagaaaaaaaaaattatctttctaaacagttggcgattcctattcttgttcgtcttcctgaacataattaaaaacatgttgtggcgcctacttaagacatcaactttcccaaggctgtcttgtccactgtgttttaaacaaagacacttgttttggcattgtgcccttaattaatcatttgaggctttattgctgtaccaaaaaaaaaaagtgtctttgtttaatgattcatcacaagcccaatttctgcagaacttaatcaaatacagaaccaactttctaatcagcttgaatattaaaaaaattgatgtagtccttgttttcaggatgttgtttgataaaagaaatattggtatgtgacactctgttcatattggctttctttcatggaattctttcatgaagatgagatgaacgctttgcttttggagtcgagaatggaagtccattgttgattgagaaaatagaaactttgacagcccagtgaatgtcatttagcatctgggccttgcagagctggggacaaagccttgaaaaaggtcttcagaattcacatctttgttttcttttcttttttttttttttttttttttttttttttgagacggagtcttgttccgtcgcccagactggagtgcagtggcgctatctcggctcactgcaaactctgcctcttgggttcaagagattattctgtctcagcctcttgagtacctgggattacaggtgcatgctaccacacctggctaatttttgtatttttagtagagacagggtttcaccatgttggccaggctggtcttgaactcctgacctcaggtgatccacccacctcggcctcccaaagtgctaggattacaggcgtaagccaccgtgcctggttttgtctgccatttttaatgttcactctgagaatcagagggcgcatcccaggatgaaggtgactctgggacatgctgaccgcagctaccctccctgacttaccacttacatagatcaggccatgggctctcccctactttcactcagccttcaaaccaccagctccaccagcttcctcatcaaacttgctttctccaggcacatccctgagcagaattcacttaaaagttactgatgtaagaaaaaacagagcaaatcaaggcacctgtaagttatgccaaggcacctgtaagttatgaaaaaggtctcagtacgataacaaaatcggtggaggaggaggcatagcatttgaattaaatcaacttacaaaacacataactctctgggcttggcatacataacaacctaagaagaagtttgggaattctgttattatcgtcacattattattattattattattattattattattattattagctgtgttatatttatgaaaatgtaaaatccatggtattgatcataagcaccttttttttttttttggcacggagtctcgctctgtcacccaggttggagtgcagtggaactatctaggctcactgcagcctctgcctcccaagttccagtgattctcctgcctcagccttttgagtagctgggattacaggcatgcaccaggacgcctgggtaacttttgtattttagtagagatggtgtttcaccattttggccaggctggtctagaacttttgacctcatgtgatccacctgccttggcctcccaaaatgctgggataacaggcatgagccaccatgcccggccattggtaccatttttaaagcactttaatatgagctgtaattcaatgttccctggatcctgctccttcaagtcaaatattagtgcaaatgccacttatgaaacactttcctgttcataactgtgaaccatgttcagcattttgggggtatcttcttctataagacgggaagtggggccttcatgtcacagaagagtgagtggaggctacgtttgacctgaagtttttctacagctaggaccatggccttggcctccctcaaccttcctgacatgatgtggagtcccaggggcctccagtctcaactcatcccagacttggcatgaacttatgtaaagggagaaaactgtgagcacttccctaaaatctaagggcagcctgcggactctgggtctccaagtgagctccatgtcttggcctggggcaattaggaaacagtggttaagagcagagctttagaatctgacagacctggcctcaaatcccaactcctactgtgagcccctaggacacttaacataagctctctgaacctgtttcctcaccttaaaaaaagtaacttaagagtacctaaggctgaggatgatggctcacatctgtaatcccagcacttcgagaggctaaattgggaggactgctcaaggccaggagtttgagaccaacctgggcaacatagtgagacctcgtctctataaaaaacttaaaaattggacaggtaggttggcacgtgcatgtaatcccagctgcatgggaggctgaggcaagaggatatcttcagcctaggaagtcaaggctgcagtgagctctgttcaagctactgcacttaagccaggatgacagagcaagaccctgcctcaaaaaataaaataaaataaaaaaaagagtacctatctcatagatggaattaaattagcctattcaagcaagaacatttaacaaagagtcccacacataatgagcattaaataaatgttaaaacatgcatacatgttgaataggcatgttgcctgaagggtgatcaaagcatcattttctttctttctttctttcaattctgttcagagggaataaacattcccctcccttgaataagacttcaggcaactcatgacttttctgctcactcttagcagggacgagcccatggtcccattaagactcagttcacagatccaattcagagtcagaaaagtcaggttaacacgtccggtcctgctctgggctggaggcacccagtgggaaattggagaagggctcgattcttctctatggctgctcctctggtctcctccccagcctgctgacaatagcttcaggatagttagaaaagggaatgggacaagaaaggtcccagccctggagcaaggctactggttcccagcctgtgtgctccaggagaatgatcaaagctgacccattgttggttttgtttttattgtggtaaattacacataggataaaatttacgcttttaaccatttttaagtgtacagttctgtggctttaagtgaatacaaactgttccacaaccatcaccaccatccatctccagggaaacaagctaactcttgatttctgggcactcacgggttctgtggacggttccctctgggccgccacttatgaagttccctgctccgggcagaggcctccgtctctcagggggtgcacagtgactctccacgctgcttccaaatgtcaagggtccaccttcagcccctgactaagggacagcctcattaaacacgcctcagcaccaccacccacaggctctctcccctgcagggcctgtaacaatcactccccactccttccctaaacaaactgtcagaggtcagctgatccaagcaagcggattcctcctgaaacccatgggagcagctagaagccttctgtttctggaaagacctccgatcccagtcctcaggttggagctagggaccagggctctctggctccctggcaggcctcgacatcttcttaacccacccccggtattcctgtcccaacaatactcgggtttgtcttggctcaggttcccccagaagcctcctctaaaacaaggattcctgatcccaggaacccccaataggggagagcggaagagggacagggaggggaagagcagctgatcatgcacgatgtcatcgtgggtaactggcccttgatcctttagagttctgggagcagatgtagaacatagtcctcagagagagctggggtgtttacaaaccaactcccgctgatcggtggctgaccgtggcaaggcgcggaagtgagggggaaggaggccaggtggagggatttcactttcagtcactttgctgcagatgtctccgccagtgggcgctggctgccagagaaagtccccagacaaaggatgcaggtgctggacttagaaatcctgcagtgtggccaggtgcggtggtgcacgcctgaatcccagcactttgcggggccagcgggagatcacgtgagctactagctttgaatcttagttctaccacttgcaagttgtgtgatgtcggggaagtcgcttcacttccctggctcagtttccccatctgataaatgggactactgaagtatctatttcatatggtgggtaggagatgacacgagttaatatgggtaaagcacttagagaatgtttgacacatagcaaggactactccattgtgaagtattttccatccattggaattgcataagcacattttagttttctatgccaggagacccagtgcagcctttcaaactaatgaaggaaattcttctatgctgatacagagcaattgcaagagttattacttagtggaaataccaagtgtctatagtattcacctttgtgttaaaaataatatctacattatatccaaaaaagttcttaaaaataatattaatatagccagtaatcccagtactttgggaggccaaggcaggaggatcacttgagtccaagagttggagaccagcctgggcaacatggcaaaaccccatctctactaaaactacaaaattagctgagcatagtggcacatgcctgtagtcccagctatttggacttgagcctgagaggtcaaggctgcagtgagccaagatcatgccactgcacttcagcctgggtgacagagcaagaccttatctcaaaaaataaaaatagaaataaaatttaaaaaatttaaaaagaataatatatacatatacacacactcatgtttatgtagagaacatttctggaaagatcagaaatgagccctcgggttacaggggtactttatatttttgtagtgtttgactttttactaagttcttgtactgttttttcccaggaaaacttttatttaaaagaataagccagtactggctcaacatagtggctcacacctgtaatcccagcactttgggaggccaacgcagaaggattgcttgagcccaggagtttgagaccagcctagacaatatagccagaccccatctctaccaaaaaataaaaggattagccaggcgtggtggcacacacatgtagttccagctactcaagaggctgaggtaggaggatcacttgagcccaggagttcaaggctacaggcatggatggcatgactcttttgccagcagcctgccaggagctaagatcataccactgcacttcagcctgggcaatagagcaagaccctatctcttaaaaaaaattttatttaattaaaaaatgaaaagaacaagccaggactattctcagtggtttaatagcactagacttaaaccaagggctcacgcaagcacatttccatgtgaatcttgctgattttcttgttaataaagctgctgagcttggtgaagtgaccagagtgaccaggctcctgagtgggcagacctgggtctgccgccttccagccacgtgacctaagataagccatgtcactgtctgcacctcattcttttttcagatggacaagaacagcttcttcagggtttttagaggattgattgagataatgtttgtaaaatgctgaggacagggcctgtcatatataaataggggttattattatacacggtggctgatttctaactgcgagctttacaaaggtggcagcgaatcaagatagtcactattgtcatttatgcaaattaagaagacaacacctagaaaagaaaatatctttcccctctctctttcatttgcctttaacatactccattattgaaaacccttaaggcttctgttgaaaacttacacaatcaacacattaaaaatcagcaaaatgccaggttggctattgtctaagattcatctttgtagtctaatgaatgtcttaagaaatgccagtgggagaaaaaaattaaatatgcaatgataaaatgatcagtacagatgattccagagaagcaggcactgtagctcctatcgctctgctctccactggggccccaggcccctcattgccccctacagtctctgctccttcctctgctccccaccccttcttcctcttcctccaggcaccccatgcaccccacacacacagcctcctactctacaggcctcccacctagcacactcttactatcctaaaactattacagataatttacctacctgtacttgcctatgcagctgcccccaaatctgtataatatcctaaccccataatataaatagtaaacaaaaagaaagtttattatagtaaaacgtgatgtatgtgtgtatatacatattatatgtgtgtatatacatattatatatgtgtgtgcctgtgtgtatatatgtgtatgcacacatgcatgcttgtgtactataaatgtatgtgtgtgtgtagatatacacacacacacacacacacacgcacacacaggcatgacagtgttaggagacgtaagaggaagtctagatttaagaaggtaatatttaatgtactgttatttcccccttttctttatattgacattttgaaacaaaagctaaataatgcctgtgtatagatgtgtgtatatgtacatcctggtgaatccggtaactgtcaggagggtcatggagctagaaaagaagggtttcagtggggactaacgcagtcagctctgcaatttaggagggttgctctggcacccacgtgaagggcaggtgggtggtggagacgagtggaggcagagaggccatgtgaggccactgccatgctgggcaactacagcaaggattagagggagatgagagagaaaggctcacagtgggcagaacacagaccccagagggcgatttgggtgttaggtacaggtcttagcggtcatcaggatgaaggcggtgggaagtggagcaacagagatccaaatatggaaagagcacgtgctgataccagaggcactggaaataatagcaatatccgaaagtctgctcaccctgcgtcattccttcagacagtagtcgggctctattcacttgttagttttcccacagggctgtgagcttgagagctagttcttcgccctttctaatctctgtagcctctaccaggaaaaagggtatcagcatgccaggaccagtgggctaaatcctacccagcacctgctataaagtttcagggcacagtcacacccatcgtttacatattgctgccttaactctgcaatggcttagttgagtacctgttacagaaaccctatggcctgcagatccaaaaatgtttaccatttgaccttttaagaaactgccaaccccatgatctcccatcatgctgagaacatagtagatgtcccacaaatatttacttagtgtgtaaatgcaaatcataacaacaggacttcttttcgtcacatagagaaataatccattgattctgttttgactggcacaccccttggattgcatccccaaatgtgaacctcttttttcccaagtcattcattctcccatttggttcaatcctttggagaattaattcttgaaaaaggctgatctcaggggagcccctgaagacagaagactaaaagttttggaatagaaaatgttttctcaaccttggcactactgacattgtaggcagacttgttctcttgtgggaggctgtcctgtgcattgtagaatgctgagcagcagtgctggcctgcaccctccctcctcccctgcatgactctcaaagctgtctcctaggagccaaagactccttccagtagaaaaccatgactctagagagagaaactgtaggtaagaactaagcaccatcttgcaaacatccctgaggatatctatatacagacacagacacacacagacacacacacacacacacacacacacacacacacacaccatagttttttttttttatttgtttgttttgttttgagaaggggtctcgctctgtcacccaggctggagtgcagtggcacaatcttggcttactgcaacctctgcctcccaggttcaagcgattctcctgccgcagcctcccaggtagctgagaatacaggtgcataccatcactcccggctaatttttgtatttttagtagagacagggtttcactatgttggccagactggtctccacctcctgacctcaggtaatctgccggccttggcctcccaatgtgctgggattacaggcatgaaccactgcacccggctgttcaccagcatcattttttagaataacgtgataggaatttgcacagcctcccttcataacctattctaatcactcaactcagcctatcagaaaatttctgatgtctaacctaattcctgcttgctgcatttgcttctcttttttttcttatcctatcttcaacaaaaactaaaaaatagggatgagctggtatagatgcttgccataataatcctccttctatggcagtctctttacaaagaaatctggagaatacataataaaagtaatcactcattcagcaaacactgaggacctcctcagctggtcctgctttgagtgctagagacacagcaaggaacaagagtgagcagggctctgagctcacagagctacattctagtaaaaggagcaaatcatcaaataaacaaaacaagataatagcacttattaatgagtgtttgacgccataagagtggctgtggctgaggttggaggggacccttagctaggatggtaaggaaaggtcttgctatggagggaatatttaagcagaggtctatatgattcaaaacagcctgctgagagagtaaaggggagaaatatctgctttccatgtgttccccattccaggttttccatctaaaatgggtgtgggatcctactacttcccaaggttcccttttttctgatgggaaggaaagaagcctctacgtggtcctggattctctgagcagcttcaaaaaacagccctcttgattagcctgatgcagcctgaggatgtcataggcgtattagtctgttttcacactgccgataaggatatacccgaggctgggcaacttacaaaagaaagagagatttattggacttccagtttcacatggctggtgacacctcacaatcatggcagacagtgaaaggcacgtctcacatggcgacagacgagaagagagcttgtgcgaggaaactccccttcttataaccatcagatctcgtgagacctattcactaacacgacaacagcacaggaaagacctgcccccatgatccaattaccaccccccaggtccttcccacaacatgtaggaattcaagatgagatttaggtggggacacagagtcaaaccgtatcaatagggatttcctaaatgagaagagtccatgccaaaagttagagactcccaggttctcaataagatcaacctgaacctgaagtactctcctccccactcgctcccagctcagtccaggccgccaaaggcctaacactaaggcaggccacccagacaggtgtgatcatagctaggatggtgtttgggtgggggagaccctctgactaactcctctaaagccaaaatgtaaacatccgggttcatccctctctctcctccagcctcctccactcagctcctgtctgtctttcaaagttcaagccatcctgtgcaatgaagcagctcttgttgggtgaattaacaacatgaggaaaagctagatccatcgggaagttggcgctaattgttagatctaagaggaaaaaagcaactgtctcagcattaagccgctttgtggaccaggttgttttgttctacttgtgactcgggctccccgtcaaaccgcctcagacacatggcaggtgtcactcagacccttctcactcactagggtcctgcagacattagctcacatctgggctacttttactaacagccagacgttggggaagccacttacactctttggactttcatctttttatcttcaaaatggaaggatctcctttggagggttgctatgaggatgagagataaggtatgtgttaataataataataatgccatcatgcagtgagtttctgctatgggttagacactgtgctaaactctttacacaaatatctcatgctcacaacagccctaagtggagggtccattatcactagctccattttacaggtaagaaaggtgaggtatagacattaaacaccatgcctaagtttgcccactctataaagagcaaagccaatatttgaactgaggtttattagactccagagcaggaggtcttaaccacaggccccttccacagcgggcagtcaataacaaatagtcttcattgcattatagctatgaccactgggagaatcagagtcaacaagtggcactactctaaccaccctcactcctgacaaacacgggacatgtgagagatctgtggccaccttgctggggcagaaggggcagctcattctgttaagggacactgatgtcacctattgatgtacagtgtcccagggcctgcatgacaccacgctgccgatctcctaatacgtcctgctgagccaggcagctgacataattatgcaaggaccatctgtcacttagcccctctctgtctctctgcaccgtatataaagcaggaattcagaaatttagtcattcactgttcaactaaccttcactaaatgtccactaagtgccaggcactgctctatacagaagtctacagatggacgtaaatgctgcactcctggtgttcacactggaaggaaagagtccagaaagtaaaatagataatatgtttagaacacagaaagaatcaaatgcctatggtggcagggtgggaaaacagggaaggccaggtacagggaggatgctcagttcaaaacagagtggtcagggaaggcgtctcagagaaggcggaaaaggtgtgtcagccgggcatgcagatatctaggaaaggacattccagacagaggaaaacagcaaaagcaatcaatgacccagaggtgaatttggattgttagagaaaagtttcacaaatttcattcctggaacaccaagctcataagacattcattgaaaaaaagtgggccaggcgcggtggctcacgcctgtaatcccagcacatgaggccaaagcgggcagatcacgaggccaggagatcgagaccatcctggctaacacggtgaaaccccatctctactaaaaatacaaaaaattagccgggcttagtggcgggcgcctgtagtcccagctacttgggactactgggagtagtagtcctgaggcaggagagtgggaggctgaggcaggagaatggcgtgaacccaggaggcagagcttgcagtgagccgagattgtgccactgcactctagcctgggcgacagagcaagactctgtctcaaaaacaaaaaagaaaaagtgtgtggggtccaataaatttttgttaatgcctcatgctgtacaccccacttttggagtttgtgttacccattagcataaaaagggacagaagatgggaagtcttgcagtaaagtcttgctcagctcaggctcactcactcaaacatatttgactacacagacatttcttcacataacacctgatggtatctcacagagctacgtttcaatggaaaccaatctgggaaactttggcataaactcaggaccctttccctaatacagtttcttgattctctgtcccgcattgggtcattcagcaaacgctcactgagcagcctcttactaaatgagagacactgagctagatttggctggagatggagcagagaataagactcactgactccatctaaaaagtcatggccacagccacggtcagccctaccatgttcaatatcaccgcagatggcgagcctttaggccatgtctccttcgagctatttgcagacaaagttccaaagacatcagaaaactttcatggtctgagcactggagagaaagtgctcctgcctttgcagaattattccattatgtacctgagtggtgacttcacacgacttaacggcagtggtggtaagcccatctacagggagaaattggatgatgagaacttcattctgaaacatgcaggtcctggcatcttgctggactcaacacaaatggttcccagtttttcatctgcactgccaaaatcgagtggctggatggcaagcgtgtgatgtttggcaaggtgcaagagggcatgaatcaatatcacagaagccagggagagctttgggccaggaatggcaagaccagcaagaagattgccattgccgactgtggaccactctaatgagtttatcttatgtttttggttttttttttttttttttttttttgagacggagctctgtcgcccaggctggagtgcagtggcgcgatcttggctcactgcaagctccgcctcccaggttcacgccattctcctgtctcagcctcccgagtagctgggactacaggcgcccgccaccatgcccggcgaatttttgtatttttagtagagacagggtttcaccatgttagccaggatggtctcgatctcctgaccttgtgatccacccgcctcggcctcccaaagtgctgggattacaggcatgagccaccgcacccggcctatcttatgttttatcttaaccagcagaccactgcttctgtagctcaggagagcaccccgccaccccatttctcacagtaccgtatcatattgtgctcttaatgcagttcgttgggtttcgtattttctttattcctgtctatggctagctggactgccgagttaaggttatgattatgaaataataactaaataacgaaaaaaaggtcatatccacaaagcaagccaatgtctgccagggaagattaaagtgtgtgcatgctgacccttcccttgaattcagtgacccaaactttccagtggacagttcttggaaatgaacggttaaggaccactcctaccccaaactcctcctcttgtcacttgtgagatttcagctgttggtctcacctgcattaggagggcactaagatgattcttatcagatccatgtggttttaagggaaaggagtggtggttgctattatagacgagacgaaaggaaaaactcacagcaatttatacgttctcaacaccttctcaagaagaagagagttgaaaaaaatctcagaaccacccccctcagatgcaatttcaaacatacacccacatacaacaccccaaccttaatcagcctttgagttagattaaattgacttccagcaccacaaacacacccgccggccaggcctctcattaccacctgcacaggattgcttttcaaaggctgggcttttctcattacaatctcgagtccaaaaaaataggaagcaatgctgggaggaggggagagaacaaaaccttatttattcacacataaaatatacttattctaatcacccctggatacactgatctccttcaatatacagtcaggacttcacgagcaacatgatgcagtgttaagaacatagaatgcaaataataataatatctatacttaacagtagtaatttgatttcctggtttgagaagctgctattaagggcattacctacttaactcctcaatgcgttcttagtccccattttatagatgagaaaacagagatctacaaagttgcagtaatttgcccaaaaaatcacaaagaaaggcgtctagccagatgagaaacccaacacctacactgtctcctggtaaaaggtatatgatatttgggttgggcgccgtggcttatggctgtaatcccagcactttgggaggctaaggcaggcggatatcttgaggtcaggagtttgagaacagcctggccaacatggcaaaaccccgtctctactaaaaaatatgaaaattagccatgtatggtgttggctttcaggaaggctgaggcaggagaatcacttgagcccaggaagcagaggttgtagtgagctgagatcatgccactgcactccagcctgggtgacagagcaaggttccatctcaaaaaaaacaaacaaacaaaaaaggctatgatatttgaaccttggtgtgcttgaatttcagcctgagcacttctgaggcaagataccttgcatggatcacatattttttctgaaactcaacttccttatctgctctctctgcaactctaggcaagagtgcccatttagcccagggtagggcctcaacaaactctattccctttccttcacccagagttttctctagactttgccaactgctttgtttaagacaatctcccaaagtcaatatgtgctggaaactgtgctgagaacttgcacatgtcacctcattccgcccatgcagcgttactgaaaaatgcattggttccccctctgtttgactggcgaggcaactgatgcttcaggatagtcaacaactggtccaaaatgaccacactgtcaagtaatcaactcatagtttaaaccaatggttctcaaagcaggtgagtttcgggggatatttgcaaggtctggagacatgtttagttgtcacgcccagggggtggtgctgttagcgcctacagactagagtccagggatgcagctaaacaccccgacgacgcgcaggacagcccagccccgctgcaaggaatcatccagcccaaatgtcaatagtgccaaagttgagaatcctttggtttaaaccagatttatctgacatcaaagtcgatgaacttgcactgttttgcttccctaactgagggtttctcagcagtactgacatttgcagtcagataattctgttatggcagctgtcctgtaggatatttgtaggttatgtgtaggatgtttgcagcatccctagtttctacccattggatgccagtagcacctcctctcaaatcgtgacaaccaaaaatgtctccagatattgccaaatgttcccagcactcgctcctctttcccctggggggcaagtcattcccgtttgagaatcattttcctaatttaaggaaatgagctatgaaatgagaataacaaaacagccctgaaaaatattaagagaatatcccggatgaccattatttgcatgtgtttttaaaaagtagatatgtctgtttaagtatacacacatgcacttacatatgtagccatgtatatatataatgtttcatacctgggcacatatggcaggaagaaatattgaccaacctcttttttttttaaatttttttaatttctggggtacatgtgcaagatgtgcaggtctgttaaatagataaacgtgtgccatggtggtttcctgcacctgtcaacccatcacctaggtattaagcccggcgtgcattagctatttttcctgatgctcttcctctcccagccaggcaggctccagtgtctgttgttccccttccacccatatgtccatgtgctctcattgttccactgccacttacaagtgagaacagtgtttggttttctgcttctgtattagtttgctgaggataatggcttccagctccatccatgtccctggaaaggacatgatctcattcctttttatagctgcatagtattccatggtgtatatataccacattttctttatccagtctatcattgatgggcatttgggttgactccatgtctttgctattgtgcatagtgctgcaatgaacatatgtgtgcatgtatctttataatagaatgatttctattcctttgggtatataactggtaatgggatttctgggtcaaatggtatttctggttctaaatctttgaggaaccaccacactatcttccaaaatggaccaccctctttctatccctgcatgtgagttctcacttctctcacttgggttccagagactacatagcagagcagaaatatagtgcagtgttccctttcttgttgtccatgttctggttttggaacctcattatcattccaaaatgaattagatcttaatttgaaacaaagctattcactcagagggacttccagccctcagacactggacagcagaagagtccacaaaagcatgagagggtccaaggtccagcatcagagtcaggtgctcatttccctgcaaggaagcccatccttctccagtaaactaaaaatttacatctgaaaaatttgatgcgtcttcacgggtgtatattgagaatttccatgtctgggaaaattgaggcacagccaagttctagcaagctctccgtgatgatataaaacagaggtaggcaaacttgttctctaaagagccagatggtaaacatttcaggtcttgcaggtgatgcaacctccattgcaactattgagctctgccattatagcatgaaaacagccacagacaatataataataggccaggccatgttccaataaaactttatttgtgaacactgaaatttgaattgcaggtagtgtttatgtcataaaacgttcttttgtttttttttttctcaccatctaaaaatataaacattattcttaacacctgggtcatacagaaacaggtagcaggctgaatttggtccatccctcccttacatagaacatgacaaaaaagggaattcctgctgtctccaaaaaaacccataaattcccacttttctatccttaagatgaaagaaattaccctcgatattgggaactcagttcagttaccactataggaattaatctaccaatatctgaacttctggaatgttctgtttacctagcccaggataaacaggggaggacaaactccgagtaactgagtgctggctttttttcttttcctgctatgacttcatgaaagggttgtttacggtaggaagtaaccaatgattttgattgcttcaggacttcctggttaaaaaataaaatggagaagaagaaagaggaaagtcctcaagttgtaagctttggaaatacaaagccctcaggtcctgtgtaaaattgaacatgaaaaataggcctctaatttctgtcctctctccctaagcagtcaaccattggagaaggtgactgggggagacccttggctcagaacttcttggtggttataaattctttatcaactatggcttatgtttttacagggaattttcttcttcctcttcttctttttttaagttacggtgatcacaattttcagatttttgactacttatcaaactttttttccctccccctcttaacagagaaggtcagtcacttttaagatataagagaatttgagaacagattaatgacaaagataaatgatgatttttattttagcggaagtttcagcgcgttttctgcccagcctgggtactgctaataaagtatacttgacatataactgcgtaagttctttgctttaaagttcaatgatggatcaaaagagagaattctctctttagaaagaaatgtcctggaaggaaaaataaaaggaaggtggaggggaagctcatacatcccttttgtctttttctcttctctttgtggcccagagacagagcattgagtgacttcttcagaaaagagatcagtgaaattgtcagttgattacttctccttgattagcatttataagagccctgtgatacagtatttgcattcctatttagccgtgatttttgtggggcaccaatgattaaacttgtcacagggcttgattgacggggtcagatcttcactttctactcttttgaaattaaaaacaaatgtgtcagctcccttcatgggctggagcgccgtgaagctcgcctgccttgtcattgcagataggtcaggaatgttttaattttagggatggattctgcttgtcaagtagagtgtgatggcgtgtggttctggagatgagatgtgaagggtgtagcacaaagaaggggaagaacaaagacaaagacactcacattattagacagatttaattagtctgaatggatattatgctagatgaagcagtgagctgtgaaattaacccttgattacggattggcggatcctactcataaagagaatcaaacctttgtggagagacgcgaggtatgatttcagtttctcctacccttccgggttgcatgccagatccccacccccaccacccacccctgtcgacttaaacaccagaatctgtagggggaaaaaaactgtggaagttcatctttaacttgagcaggcaggtatacctagaaaaggaattccacctggcttcctctcttcaactttagagaaagcaacaagcccagggtggttggatgtgaagctaagaggctcacaaagacacagatttctgaatccaaaatagagaacagaaatagctaagtttgaataagagccatgtattttgagggtctgaagtgaatagctctatccactgcagtagagggtcacctcccgggaatgtttgtccttcatacaatgtgccccccaacttactgctgcctttccatggtcttctccagtgaatcccagctgcatcctgacttccaagaacttcaagcatgttaagaaagggatggaaggcctagagccctcacccagcattgatggtcaactaagaaaagtctctcaaacattaatactaaggactctaacatggagggggacatgggcgagatgggtctgagatcatgtggccttccagaaatcctttaacttatccaaattatctgatttggcacactctggactctactgataaaggctttgtacaaagcttgcaccaactaacatctctatttttaagtgactcagtccaaatcattctccagcactgattccaggaatgagaagtctctgtgggggcatgatgtggaggagaagtatctgttaggctggcccaggtcatgtggaaagtcagcaaattaggaaatgcagaaatggagttagagaatttgctccgcagctctttcacaaactcagtcttctcgttggtgaatgagatgtgtagctccttctttaacaattgtgctgaaatcttaactgtgtactttaagtgccaagaaaggcactgtgtattattattatagctctctgtagaaaacatggcactaattctaagtcacttttctggctctgtctccatccagtcttccttatcacagtttcccactttgatgtataagtggcttcagtttggggaactcctggttgaggaattccctgaacaaacaatttccaagtgtggtcttgagactctgaatcaattgtcatgaattgcagataacttattcccaatcattgttgaaggatgagggtggtcaatgaactcattggcattacactttaattttctgaatggaacagacaaatgggaaattgtaatcctaaccctggctccatttatgaaaatgcaaattctctaactccatttctgcaattcctaatttgctgactttccacatgacctgggcgggcctaactgatactcctcttccacatcatgcccccacagagccgtctcattcctggaatcataaaaatgtcatgcatgtgaatgacaggcatcgcaggtcaggggagggaaactgttgagaatctctgctctatcaggaaatgccagtttcccttcactggcttgtgctttaggtgaccatactgtggaggtcacattgctccaggtagatggttgtatctcaaagtccttttgcttttgtctctggaaaatcagatgattctacaggtaaacacagctatagttactgctattcagaaatgagtattgtttccttcccaaagataggttttgtttctgaagaaatttctttcttagaactaagtgatacaagaaataacccactgcctccgatttgacttcactgaggtttagaggaggaaatctgcctttacgggacttgataagggaacacagagcaacctccaccacagagaattatgcagcccacagtgtcaatagtgccaaaacaaaagggacattgtgatcctaaccccagctccatttatgaagatgataaattccttaccagagaaatagagaaatctcttgatatggtttggctgtgtccccacccacatctcaccctgaattcccacgtgttgtggggggaacccagtgggaggtaatcgaatcatgggggcgggtctttcccgtgctgttctcgtgatagtgaataagtctcacgagacctgatggttttaaaaacgggagtttccctgcacaagtgcttttctcttgtctgccaccatgtgagacatgcctttcaccttttgccatgattgtgaggcctcctcagccaagtggaactgttaagttcattaaacctctttcttttgtaaattgcccagtctcaggtatgtcttcattagtagcgtgaaaacagactaatacacatctcttgtcaggagaatcaaaaaattctattaggggattcctggcacttgatacccttgaccctgaaggtacacagagtggtttagatggtacttgggtgagcttttctatggttatgtatttattttaaagcatattcaattgtgtgtgtgtgtgtcagggtgtcagggtttctcaggtctggcactactgacgttgtgagttgaataattctctggggtgggcagtcccacacattgcaggatgtagcagtatccttggtcctcatctgctggatgccaggactctcaccaggccaggtgggacagctaaaatatctccagatacttccaaatgttctctgagggacaaaatcactcccaattgaaaaaccctactatatatctatgattctatagacattattggacattattgcttaaggggataaggcttctttttttgagacagagtctcactctgtcacccaggctggagtacagtggccctgtgttggctcactgcaacctctgtctccagggttgaagcgattctcctgcctcagcctcccgagaagctgggactacaggctccctccaacacacccagctgatttttgtatttttagtagagacagggtttcaccacattgcccaggctggtctcaaactcctgacctcaagtgatccacccgccttggcctcccaaagtgctgggattacaggcatgagccactgcacccggccaaggataaagctttttaaagttacagaaattaaagaaaaatattatattaaaaaaatagagagagaatacaggtgatagtgctgtggcagaaatcaagaaatcagaaatcaagaaggttatatgtgagagaaagaagtttatgggccatatgcagtggctcacacctgtaatcctagcactttgggaggccgaggtgggaggctcacttgagcccaggaattcaagattaacctgggcaacatagtgagaccccatctcttctaaaaggaaaaagaaaaaataataaaagattttttaaataaagcgagaaatttaggaaacactgatttgatttagtttagtttagtttagttttgttttgtttttgttttgagatggagtcttgctttgtcgcccaggctggagtgcagtggcgtggtctcggctcactacctcctcctcccgagttcaactgattctcctgcctcagcctcccgactagctgggactacaggtatgcgtctccacgcccagctaatttttgtatttttagtagagacagtgtttcaccaggctggtctcgaactcctgacctcaggtgatccacctgcctcagcttcccaaagtgctgggattacaggcatgagccactgtgccaggcctgatttagtttttaattcacattttacgatgtggataactgaaatccagaacatgagatggacttgtccaaaatcatgaagctgtcactccctgtattaacatcactaagacaatgcaggaaaggcacttagggctgggtgcagtagctcatgcctgtaatcccagcactttgggaggccgaggcagatcacttgaggtcaggagtcctagaccagcctggccagcatggcgaaaccccatctctactaaaaatacaaaattagccagatgtggtggcacatgcctgtaatcccagctactcaggaggcagaggcaggaggatcacttgaacccaggaggcagaggttgtggtgagctgagatcacgccagtgcactccagcctgggtgatgagaatgaaactctgtctcaaaaaaaaaaaaaaagaagaagaagaagaaaagaaaggcacttagcacaccacctgccacctagtaataataacaatccctactacatattgagcacttgctatgggacaggtactgttttaggctctttacctgtagcaactcattgaatatttacaacaaccctgtgaggtaggaattattattattcccatttataaaaagagagaagaaaataagttaaacaaatccatggtgaaggtggaagagaataagccattttgtggagctggggatgggaatgtgtgatttattatttatgctttctttcatacctattttaagatatttctctaagtgtctactatgtgccaagtaatatgttgcatgtggcccagaaaatacacataataaaaacacgtaaataacagtcaattattaccattagctgttattcccatggttctgtgtgctgttactgagttagtaaaggaagcctatagctgtcacttcttgcatatcattcatgcaaatctggagaatttgtgggttttttatttaaatagctttaggggtatacacagattttggttacatggatgaattatatagtagtcaagtctgaaattttagtgcattggtcacccgagtagtgtacccaaaatgtagttttttcctcactcccttccaaccctccccacttctgagtctccagtgttcattacaccattctgcatgccttcactcacccataacttagctctcacttataagtgagaacatatggcatttggtttttccattcctgagttactttacttagaataatggcctccagttctgtctaagttgctgcaaaagacattatttcattctttgtatggctaagtagtattccatgctgtgtaaataccacattttctttatccactcatcagttgatgggcacttaggttggttccatatctttgcaattgtgaattatgctgtgataaacatacatgtgcaggtgccttttgatataacaatttattttcctatgagtagatacctagtagtgggattcttggattgaatagtagttctattattagttctttgagaaacctccatactattttccatagtgattgtactaatttacatttccatcagcagcatataagcattcccttttcactacatccatgccaacatctattgttttttgacttcttaataatagtcattctggctggggtaaggtgacaaaatgctcaacattgctaatcatcagggaaaagcaaattaaaaccacaatgagaattttgtttttttcagttgggcttctgaagttttgttacttaagaaaattctaagttaggaatgctttaggctgcaaataaaaggcagctttacttatagtgatttgaataaatcaagattttcttttctcaccatcccaacatccagaagtaggcaacaatggcattgagtcaatggattagtgatgttaatcactaattgacatctggattagaagatgtctctgtgagtcttttgatcattgccttacaactgcaagatggctgcatcatgtccacattcaaggtaggaaaaggagtgaaataacagtactagctacctttgcccctcttctcagaggagcaaatctttcttggaaacccagcagaattctacatgaacctcctcagccaaactgtgtaattttgtcatccttagctgcaagatgctgtgacatatttaactgggcacactgtcacagaaaacaaaactaggattttgtccgggcactgtggcttacacctatagtcccagcattttgaggcactaaggaaggaggatcacttgagcatgggggttctagactgcagtgagctatgatcatgccactgcattccaaacttggggacaaagagagaccctgtctctacaaaaagtttaaaacatacattaaatgggtgtcgtagcatgcacctgtagtcccagcaactcagaaggctgaggctggtggaggatcgcttgagcctaggagtttaaggctgcagtgagctatgttcatgccactgcactccagcttgggcaataaagcaagactctgtctataaaaagaagcagaacaaaccaacacagacacacagacacacagacacacacacacacacacacacacacacacacacacacagaattttattggcaaggaagaagagtgaaatggatattccgtaggtaactaatggtatctgtcccagggactaatccagtagcaagaatgttctgtcagtcctttttaccttttctccccagtcttttctcatcctgtaaccagcaattgactggaaatctgtttatctttctcaattgttaattgatcatcaaatgttgactagatacagtattggccaaaaatttcctaaataaaatgggctttatgaaatgcatttttttgagatgggatctcactctgttgcccaggctggagtgcagtggtgcaatcttggctcacggcaacctccacctcccgagttcaagcaattctcctgcctcagcctcccaagtagctgggactacaggcacatgccaccatgctcagctaatttttttggattgttggtagagatgagttttcaccatgttggctgggctgatcttgaactcctgacctcaggtgatttgcctactcggcctcccaaagtgctgggattacaggcacgagccaccacacccagctggaatgtattaataatgtaatcataatcatcattactgctactaccaccaccacaagaataacctgttgagtatttcccatgaattctaagtgtttcacatacattatctcatgtaatcatcacaatgaccctccaggtattatcatcattcaaatttaaggtcacccagcttggaagaggtggatctagaccttgaacccaagcccaagccactgtttttgcttttaaggtgctgacaatacaataagggagacaagagtaactcataagaagtagtctaccagtactgcaagacaaaataatactaagtactaaactatgtggtcctggaaataggttttggaagaatcataaggaagatcgttttcatgaaggccacatgtagtcaagaaagacacttgagttgtccgttagggggatattagacttgttttctacgtgtagtggttatcagggtcagttctgctctcccagctacaacaaacacacagaaccaaacagaacttaggaagtctggagagccgcaaagcaagcagacaccattagactctgcgtagatttgtttagagtttgtgggcattgttgaggtctctcagggtctgctgacagtcctgtgaccatctgcctggcagcaaggacttcagttgtttgcaatgctttggccaagccgagagcacgcggatctggatgcacagctgctgagcgtgtgctgacgggcctcagctcctcgagcgtgtttgttcagactggtctgcctaaatccactccaaaattcttccgagccagaaaaggagaacatgtgctttcttttcacatagtatttctgaatgcccatgaatataaaagagagaaaacaaaaccaaaaaagtctaagatacatgatattcccaaacaacaaaaaagacaggaagctttcggaatcagaaatctggccctttcttaagggaattccctgttggtttggagaccatgctggttgttagaaaatttagataaggaacaattttatttctttgcagcacagttcaaccattattttctgagtaccaattgtgtgcaaggtcctgtgtcagattctagagcaagatgctaatggatgcaaagacaagcaagaccatcaggaaactttttggcagaagaagcaataaagacttcactgagaccaggacaagagggtgatttggagcactgctaagatgactgtttccttctttgtttttcccccgccccgggtaatgagcacatattgcagaaagaactttacataaaagttgaaaacgtatctatgtgaaaaaacaaaataagggaaggcattatagcatggtaacagggaactttttttaaattaatttatttattttgagacagagtcttgctctgtcgcccaggctggagtgcagtggcgcgatcttggctcactgcaacctctgcctcccaggttcaagcaattctcctgcctcagcctcctgagtagctgggattacaggcgcgtgtcaccacgcctggctaattttttgtatttttagtagagacgtggattcaccatattggtcaggctggtgtcgaactcctgaccatgtgatctgcccacctcagccttccaaagtgctgggattacaggcatgagccaccacacctggctgtaagaacatttatttggaaagcagctttatgcaagctcaaggtcaagctctccctcttgctaagtgtgtgacttttagtaagttatttatcaccctgtgtctcagtttcctcgtgtctaagatgggcatgataataccccaacctcacaggactgagacaatgcaagaaaagcactgagcacagtgccttgcacgtaacaagtgctccgtcaatttttcttttcaatgatagcaataatgataacatattgttatgatcatcaggcgtagtgcagtatctggaatagagtgagcactcagtgatggtttctatggctgggctgttttttgtgcttccactgttgaagtatttaacacagtatctggcaacacctggtgactcaaagagcaagctatgatggttccaaagctggggctcagggtgaaactctctctatgggagatctctgggattctcctgttcaggcttaacgatgaaaggtaatgtgccttcttttcttttatctccaagaaactacgctagtcagtttgatcctgcccaaagtcgccataaagttaaaattcacaaaaccaaacccagaagctcagaggctgcccagggaaggacacacagtgccctgcggtgtgtctgtgtttctacatctgaagccgtggacgacgtacctagacagaagatgccacggatctggccccagggcttattttatttatttattattattattattattattattttttttttttttttagatggagccttgctctgtcatgcaggctggagtgcagtggtgggatcttggctcactgcaacctccgcctcccgggttcaagcacttctcctgcctcagcctccccagtagctgggattacagtcatcttccaccacgtccggctaattttttttttatagttttagtagagacacagcttcaccatgttggccaggctggcctaaaactcctgacctcaagtgatccacctgcctcggcctcccaaggtgctgggattacaggtgtgagccattccacccagcctcctttcctcctgttcacttactcttggccctagcaattctgtgtgattccaggataagcctcatgctttttttggaattccatcttcttgctcccattgtcctccttgtctctttcatatgaatgttttctatatttcaaagccctgctcaaacaccacctcctccagaaaggctcctggtatcctctttcttttctaacctagaaaagagtatgccctcctctgggcacctccagaatattctctcacgtcttatatgacatgtgtcaatctgtaccttgatttataatcacgtgtgtgttaggactatggattgcacatgacagaaaaatccactcaggccaggcacagtagctcacgcctgtaattccagcactttgggaggccgaggcagatggatcacttgaggtcaggagttcaagaccagcctggccaacatggtgaaaccctgtgtctactaaaaatacaaaaattaggcaggcatggtggcaggtgcctgtgatcccagctactctggaggctgagccaggagaattgcttgaacccgggggacagaggttgcagtgagccaagattgcaccactgcactgcagcctgggtgtcagagcaagactccatctaaaaggaaagaaaagaaaagaaaagaaaaaagaaaaatccactcaaaccagtttaagcacagagggattttactggctcctgggaaggtcaagggtgcaacagattcaggcaatgctagatccagtgcttaagtggtgtcactggaaatctggccttctccacccgacatggtttggatctttgtcccctccaaatctcatgttgaaatgtgatccccaatgttggaggtggggcccagtgggaggtgtttgggttatgggggcagatacctcgtgaatggctcagtgtcctccctgtggaaatgagtgagttcttactctgttggttcacaccacggctgactgtaaaaaaagtgtgacacctctccctctctctcttgttctctctcttgcgtgtgatgtgcctgctcctccttcaccttctgcagtgagtaaaagcttcctgagggctggccagaagcagatgccagcactatgcctcttgtacagtctgcagaactgtgagccaaaataaacctcttttctttctaaattacccagtctcgggtatccccttatagcaacgcaaaacagactaatacacagcctctcaaatctcctggaaggatgtacttgggtgtacttttctttcttttttttttttctttttttttttggagacagagtctcactctgtcacccaggctggagtgcagtggtgcagtctcggctcattgcaacctctgcttccagggttcaagcaattcttgtgcctcaacctcccaagtagctgggactacagatgcccgccacgacaccccgctaattttttgtactttagtagagatgggctttcaccatgttggccaggctggtctccaactcctgagctcaggcaatacccaagtgctaggattacaggtgtgagccaccaagcccagcctgcaagggcataattttcatgtggtggctcagaaacctccagcagccccaagttgagccgtcataataagaaaatttattttttaggaagaaatctctcattggactacctagggtcgtgtgctcatccctggaccaatcactgtggctaggagaatagaacatgctgattggccagacttgggtcacatgcccagccctgtagcttggaagtggggtgagccctatgggatcccctgacctaaaaatgagaaagcagtggatccccaaataaaaattagggctgggctgggtgcagtggctcacgcctgtaatcctagcattttgggaggccaaggcaggtggatcatctgaggtcaggagttcgagaccagcctgaccaacatgatgaaaccccgtctctacaaaaattacgaaattagccagacgtggtggcacacgcctgtaatcccaactactagggagactgaggctgcggaatcgcttgaccccaggaggcggaggttgcggtgagctgagatcgcgccattgcactccagcctgggcaacaagagtgaaactccatctctaaaaaaaaagaaaaattagggctgtcgcctgaaggaaacaacaattatttatggcagttatacagttcctgcctgttcatttcttggtaattcatagtgcctagcattttgttcatcataaagtacatgctcaacaaaattatcaaataaatgaataaacaaagagtatgactttaaaatgtacctactgactttgcacatgtcttcctctgacactcacagttatactgtatttggccaagcagagatcacacatcattttgagtatttctccagctcttttagggagtatcttaggaaaccagacatcacaaatccttccatctggagtcagtaataatgcagaagatactaatgtttaataatccaaagtgcctagctcactattaaaaaaaaaatttttaacctaataagagagaattggccgtgaccaagtccttgacctgtctgttggaatcctccctttctagccatttctggtcatgaaaattgggcaggatttctggcatcctttatgcttctttgttattaaaagcaggatcagttaataaataattatgatgctcagtttctagggaacaaggagataaggacaggaacacttgagtctcacaaattacatgctatagtatagattctcacccagagtgaagaatagcctagctttttttttccctgtggcataaattgttctaattatacgtgcaagatcctctattcccaaagatatgagttggaagcgctgtgtctgttcttttaattccaagaagactttgcagttgggtgtttccaccccccttgttttcaaactgaattgtttcagtggtagcttggtgtgtcagcttgtaagtctataaaacagttttataccagctggagattcaacatgctacatgaatacataacagtgcctaaccaagaaggtttgtaattcagtaattagctgtaattaatgaacacaaagtgaagactcatttacagtttaaattatcacattagctcctgtcaccctctatgtacacaaaacagcaggaattcaattatttttattcttcaaagctaatttaaaatttaagggatgccattacatgaaataataggtaggaaatgtaatcgaaatcactgggaacagttggccgtccttagaattaaaaaaaaaaaaatgtgatcactgacgatttggaaatgttttttcatctgtgaacagatgaaggattgaaatctctgctcttttcagtatatttaatttaaaaggagaagcgagtttggtggttgcgggatcttcacgcagggagaatcatggtgcgtaattgtaaaagcagctgataactgataatgctgttgatagtaacaagagggcagcctgggagacacacattccattatccctaatggagctgagccttctgcaattgcagggggttcctggaattgtcacccatttctgatgcatcatttcagcttgggagaccttacgtcattgtcacatttctgtcgtccttaattctttgttcgtatctatgataaatattctttcattcattcatcaaacattgacagagcacctcctcaggctcaggcattgttctaagttccaggaccacagcagtggggaagacaggccacattcctgatctcgtggagccaacactccagtggggagaaacggacaatagccaggggttctcaagtttggctgtgccgtagagttggggaggaagctttaaaaatacatgtgtatcaatgcctggtcccaacctcaattgattgaatcaaattattctcactcctttctttcattacaactctttaagtatgcaaacactttcttagctcaagagctgcacaaaaacaagctgtgaactacatttgacccactcaagccacgttgggaaaaaacaagaccagcaagtgcaaaggccctgaggcaggtttgggcatcagtatttttagcagctttctaggtgactcacatggtcaaccagggctgagaaccattgtcacagactaacaaatacaacaaatacatgtttattggtgatgagtgctgcaataaaaattaagcaattgagtgtagaaggtaactacaggctgctctggattgggtgttccccaatttcttagggaggtggcatgggagacctgagtggtgagaagccaatcttgagaagatctggaaagttgttctatctcagccatcagtaaaacttctgctgctttacttcttccttttttttccattataacccttatttatttgtttattttattttattttattttattttattttattttattttattttattttatttattttgagatggagtctcactctgttgcccaggctggagtgcagtggcacgatctcggctcactgcaagctccacctcctgggttcccgccattctcctgcctcagcctcccaagtagctgggactataggcacccgccaccaaaaccggctaggttttctttttgttttgttttgttttttgtatttttagtagaaatggggtttcacttgttagcaaggattgtctcaatctcctgacctcatgatccgcccacctcggcctcccaaagtgctggtattacaagcgtgagccaccacgcccagcctcgtattttatttttgagatggagtctcgctctgtcacccaggctggagtgtagtagtgcgatctcagctcactgcaacccctgcctcccaagttcaagcaatttttgtgcctcagcctccgagtagctgggattacaggcatgtgccaccttgcctggctaatttttgtattttcaatagaggcagggttttgccatgttggccaggctagtcttgaactcctgacctcaaatgatccacccgcctcagcctcccaaagtgctggtgttacaggcgtgagccatcactcccagccttttcattataaccctttaaatgtgcaaacattctctccactcgagggctgtgcagaaacaaattgcaagccgaatttgacctatccaagccatattctaaagaaaaggatcagcaggtgcaaagctcctgaggcaggcatgagttgagtgtgttgggttgggcagaaagaatgcctgcgtaggtggggcttagctggtaagaaggagtagatgaggttagaggaatgagcaggaatttagattttattttgtatttgttgaaaatataaaggaagattttaagcagggaatgtatgagtgtgtgtacgtgtgtgtaaaggagacagttctgtacccatactctccacagtatgtttccctgcaaccgccactaatctccttccatgccagttccaggaagaaaaggaaaagcaaaccccatgtcaaaagaatgctgtgtctgttgctttggacttctcttttctgcactttccccctcctcttcccatattcatttttctttttcctttaaataggccactcgaagctgcactgtctaatttttcataggtgatcgactgctgagcgggggcttaggtagacagagggaaggtgctgataagccagtgcacggattctattagggaaatgcggtggtaattaatgaatcctgccagtaatcgggaaggtgtgagtccccgtaatatcgtaatgatagtcatctgtctgcgaaccccccatcactctgagagatcgctcatcgctctgtgatctcagactcttagccatgcaaatctccctgacaggacgctatgtctctgtctccctaattgggcattctagagttgtttatggatattgccggcatttaggcctcagttggaggttgttcaaaaagcgttagcaaacttgccttaacaacattgtcaaatatgtattcccccgtttcgatatctgtttttaagccggcagaggtttgtgatgaaattaagtgatgcattgtgtgcacttgagctctgggcgtgattgttattaaaccgtttttgaagtaaaaaccaatttgcagtaatatctcatcccgcttaagatcaaacttcagtttgtgtgcaggaactggatgcttttttaatagcatgtcctcgtttctatagagaacactgagtatgttaatgccatcccaagacacaaccatttgcaaaaattacagttttgcattgagactggtttctaaacatccatcaccatttaattccaaagaagcgtctttactggaagcacttgccacattttcttgccagtatttttttttctgcatacaagtggtcaccctcttgtcttcccccaactggtgtgatcaattgcttgaaatgccatgaaatatatatattttaaaagcctttataactctgataagtgagcttaatatttctgccatgatgtttaagagggatcttttaaatatttagaaaacatgggaagtaccgttttaatgtataatcaacacactttaaaatattcaaatatgaactgggacagtttagactgcatcttgatcaactctaaataggagaaaaattcaagaaattctggcctccattttcttccacatgaaggaagaaagagatgtccatgcaaagggcaacatagatttagaatcctttaaccccgattcttccatccatgagccctgggtggccttgattaagctacctagcctctccgatcttcaggtatcatctgtctcacccatgctcaaatgtcattctaaggcttaaagcaagttaatggctgtgaatgtacatcatttccatgagggaaggggcttggcagtcacacccaagtagctctgctgggagaacttgaacaaatcactgaatgccctctgagccatagtttctgcatccgtaaaatgagccagttatacacactttgtagggtaggtctgaggagcagagataattagttgaaagtacccatgaagctggagacccagaagtctctccaccaatggtggctactgcctgttgaaacccgtggagagctaggcctggtgtgttccaagggcattcgcagagtggatgggggaaccaaggcaccatcaacactgaagagaggtttggagagagggaacgcgtccctgggaatcgtctctctagagtttaagtacggtggccagccatcatcgttttcccgggactgaggcatttcccaggacaagggactaaaaccaggatgagaagtcaccctatgtttgaacaaatctcctcttcagcccaagaaatggacaggtcatggttcactgaagccccagtttccctgagaaccttctccatcttccattctgagctctgtttgctgattagtcgtggttctctgtcgcacattctagcatattctggaaactctcaagaaacaaaagttgctgccagacaatgctctccctccacacacggctccatctcaactccacggacactagtgagagagccactggtggctacccctttcccaactgtgtctctattaggtgagtgccggggacaggggaggagtgggcaccgagggaacaggcaagaaaaggagagagtgagtcctccagtgccggtactgcagtgtgctgggaatcaccaggaagggattgagagaggcccacacatgtgggaggggagctagggaaatcaatttggcaggagttaatcacgagagccctgtcagcatttcaaggacaggcttgtgttttcctgttcatccgtaagtaaacactgaaagcctcctcaactgtgcaaacccgctgagtcttttctccgtggacattctagcccgggaagtttctagggtatgtcaaagtgtccacaagccctgtaacctttggtgtgtaaatcacaaacctcccagggtggtctgcttggacagctaggactttcctaccaaagtcttcattcatcccaagtggccaaccagctggagcatctttaaattaaaggttttattttgccacttggccccccagcccaacccctggctcctttttctattctaaatcactgtcccttgctcctccaagctctgaatgaattgcatgtaacgaacatgtctgctggtaggcctctgtcatgagcattgaggccgatgtggttcagtaacctgatgcctcaaacttgaataaaacacatgccagggcctcccatccttgaatgtgaatgtgctggcatttcacattattaaaaaaataaaggcaggagggatgagagggagaaacttgaagtgtaaggaacttttctgaatgcagcagctaccaatcctggatgcaaactgctgtgcagaataattgtcaaatgcttgcataaacacataaataagataaatttattttcatgattcatattgggtgctctttccttccacttatttatgctttaaacaacagttacggtaaatataacgatagaaaagtgcctacagtggacaggaagatgatcaagaagtcctgatatacagcaatccacgttgcttctttacaatcactaacgaatcttaactggagccatgttccgttcccatgtgagtgataagcaatgatttattatgaagtgtcatgaaaccggaatgccatacagtgagccatgagctagtggaaaatgttttccctgtttcccaacctcattactcaaagatgcagtgtccctttaccaagcctaatttaactgacttttttgagcactctactcattggcaatggaaagtggccaattcgaagatgtccaggaaagcctggtacccaatgccacagcactggtccatatggtgtctgagctggccgacaatgctggaactgtgcaaactggccagtctccagaagtacaatcccaagaatcagctcagctctctgccaaagcagcaaagacactaatgcactcaggaaatgaaacccaccaggggagagggaacccaaagagcaactttgttagctttggaccttgtattatctatatgtcatgccattgtcctacttggaacacgtgccttgatcatgtaagatgtatccaagggtacaagggagccagctgagcctagaggaagaccacaggcctcagaggcaagccaaacctggtttggtcccacctcttccacttacctccacaaccgctgtggtagatgcaccaacaaccccagtactttacccgctctgtattcatgcccttgatcatgtcactgtgtggtgtcctctcgtttggattctaggctcagctatgtgacttgctttctccaagcagatgtgatgcaggcagtggcttgaaaagagcttgaacctctgccattgttattacaacatacacagactagcctgctggaggatgaaagagctatccctccagttgtcccatccttgaaacaggaagtgaatagaaggtcagcttttggccaggcgcggtgacttacgcctgtaatcccagcactttgggaggccgaggcgggcagatcaagaggtcaggagattgagaccatcctggctaacacggtgaaaccccgtctctactaaaaatacaaaaaaaaaaaaaaaaaactagccgggtgtggtggcaggtacctgtagtccgtcccagctactcgggaggctgaggcaggagaatggcgtgaacccaggcggcagagcttgcagtgagtcaagatcgcaccactgcactccagtctgggtgacagagcgagactctgtcgcaaaaaaaaaaaaaaaaagagagagaaggaaaaacaaggtcagctttttcactcttctctacttcctccttttttacacctccttttccttggatgggtgttggtggaaagaaggacatgaattcataaattctcatattgatgaaatgctactgcaatcatctcttgccagtggatgcccctggtaaggcaggtatccagggactgactctctagtgggggcacaaatggggtctacagaagtcccagctcctaacatgggagatgagttccattcaggaagacttctaacttctaacctaaacagctgccccactcatggttcacccttcactctcttgcccctaagagccttcctcccctctagggctggaccccataagcaaaaagacagctcttgacctagtggaaacttacacattttttttcttgccacagcatggagcatgtaggaagctcaactgctttccctttttcactccatcaccttcctccaatagcctttgctccttctcaatagtcacagaatatagatcagagactgctgcataagcataacccaacaggaaattagatgccaatctcctcttcttgctggaactcaatcccttcaagtgtttttgtaggaccactcaccggacttcagtgttccccctccaagaattcctccacgaattcctccagtcttttcctaaacaggctggtgcaagaaggagaaactgattagtggcctgttcttctgccacttaataaatcccatggaaatgtgtctgattgctctcccttcccttttttacaccttttattttgaaatacttttagacttcaagatagttgcaaaaaatcgcagtttatgcatacccttaacccaacttcccctaatgtcttgcctaagcatggtacaattatcacaagcaggaaattaacactggctcaatactagtcaccaaaccacagatcttatctgaattttatccaaacgtccttacgctgtttcaggacctaacttgggctcttacattggatttagttcttgtgtgtccttccctttccatctgtgactgtccctcaatcattccatgtcttttatgagcttgacacttctgataaacactggttggtgattttgtgaaatgtctcccactttgggtttatctgatgtcctctcatgattggattgatgctatggatgtgtggcaagtttaccaatgatgtgctctctcctcggtgcctcatattgttactgaaacaccaggggttccatctgtgtcctgttgctcactgcaaattaaagccaaatcaccaagacagtgagtattgccagggaagaagaaatttttttttttttttttttgagacggagtctcactctgttgcccaggctggagtgcagaggcgtgatctcggctcacggcaagctctgcctccctggttcacgccattctcctgcctcagcctcccgagtagctgggactacaggcacctgccaccatgccccgctacttttttgtatttttagtagagatggggtttcaccgtgttagccaggatggtctcgatctgacctcgtgatccgcccacctcggcctcctggaagaagactttaatcgggtgctgcagctgaggaaaggggagatcagtctgaaatccatctccctgattgagtaaaattaggggtttatatagcagagaagaaatataactatgtgtaggaaaacaggagttaaggagggttaaggaagaggagttggtcaacaggaagcaggtagtcacttaggcaatcatgatgaatgaggtgtctggtgtctcattgtccagatgcagtgatctggtaagtttcagttcctggatactatcagggagtcctgagggttggtttcctgagaaaggaactcagataagacaaatgtaactttctcaagttttaagactgggagggtcaatttctgtgtttcctcaaaataaaccataaacatcagttctatcagataattgggctggtttccatatcaggagtttcttgatgttgatttatcttattactggtgatgtgaactttgatcacgtggttaaggtggtgtctgacagcttctgttaagtaggaggcatacagctcctttagtccttaactttgtgtcattccccaaaatgtcatgaaacaagaaggtttaactcagtatcctgttaccctagctgtgtgatttggggcatataatttgatgtttctctggaccacatatttctcttctggaaaaggagactaaaaataaccacctttcaagattgctgtaaagattagtgatcatccaggcaagatgacagatggcctggtaaaccctcaaaaaatggatacaaagaacatcttgagtaatttgcacacattatcaccaactctcccacacacaaaaaaaagatgtatataatcatcacctatttttagaaaagaaacctggaacttgaggctatgtgactcctccagtcatgtccctcccctgtatcagagtctctaatgactcatcaccccccaacactttactgtggtccttcccagatcactccagattacccttttaatattagtaaccactcttaacccctggaaggtatgattaacatgtggtccctggagtcagagagccctaggttcaaaccatacctgggatattttgtgcctgttctttagattctcttctcctttccaaagtttctaactcattgggttgttgtgagaattaaataagtaaataaaagttttcagcatagtgaatagcaagtagtaagcacacaataattatatatgaaatgggtggtaattaccatttactcattcaacaaatatttatgaggcacccactatgtgtcaggcaccgttgaaggctgtcaacagtgactgaacaaggcaagaaatgtccgtgtcctcattgagtttatgttacagtgggtaagatagacaaataagtaaacaagtaagtaatatactaccacatctcttaagcaatgtgttggttaaatgaactcaccaactattccccaaacaagactgtatccttctgcctggctgttctttccacacagaggactacctgttccatcttcacatattaaaatcctacccccttcttcaaggcttagctcagcctccatcagttaattaattattcatttattgattctttaattagactgactactatcttatgggtctgcttctcccaccattaagagtgtcccaatgctattatttatgtacacattaatcaccacccccatgagcctccagagcaccatttacttccctttggcaacattgatctactttttgttatgtgctttgcattctactttcttcaccagattttaagtttgttctctaaggtcagagaccacatctagctaatacacttactgggtgggaccctcttaatgggcctagggcctgatatgtataggtgctcaaatgtttattgattgaagaaatacatcaatgaatgaacatatcttaaccttcttgctgaattgtgattcatagaaggcactggctatgccttactcatttaatatttgtttaaatgaactgagacacagtagtattgaacatatttgctccactaattattttgcttgtgcttttggcctggtctctcttttgatgtccccatctccccctctttaaaatacatccttccatccttagatagttttttgctacattgcaagaattatgtgatggtaaaagaaagaatatgtgtaaagcattttgattgctttggcaatgaggtgctccaaaaatctcagggatcactttttgttgccagtatatagtccctaacttttcttgaactcatgcaggatccacaagaatgagccatttgcctttattctattattgtttatgatttcataaggcattatcactaattttactgtgaagaagactctaaagaccactatttttttgaggcagggccttgctctgtcacccaagctccaggatggagtgcagtggaacaaacatggctcacttcagagtccaccttctgtgctcaagcagtcttctcgcctcagcctcctgagtagctgggattacaggcatgtgccaccatacctggctttttgtttgtttgttttgagacaaggtctccccatgttgcccaggctggtcttgaactcctgtgctcaaccaattctcctgccttggcctctcaaagtgctgggattacagtcatgtaatccaccactcctggcccacatttttctttctagtacctatgcaggctgccaggaaaagaaaaacaaaaggtgccaagtagtggctttaaggatttatttagtttcctctttacagtgtccacttttctctacttaatactactttccagtctcagaagcccagagggaaaaaaaaaagaccatgaatcttcctctcccagattaaagtacacactttggaaaacagattggaaaacctttctgaaaaaagttgactgaaactccaaaccaacatgccatattgttgatgttgctcatgaaaattgttaaaaacctgttctagataaagaacagtctcaagtttttgtacagcctacacatagtacaagggtcccctatgatgattcttctgtaggacgaaataatgtaattttttcagtttctggtttataactctctcgatctcaaagttgactgattaaaacacctactcatgcaacagagaataaagcactcatatttttataaattatatggaccaaactattttggaaatcttatctattggagacacaatatgctggactaaagcaataattattttattctcaatgtctgtgctaacctcaatgacttagaatgctttgctatattttgcctctatgcctcaaccacactggctttcttttagctcttgaacaagccaaactgcttcctgcctcaggaccagatattttgggacttctcttaagaattctatttccttaattctttatctgggtaacttagttttatccaacacttcagatcctgccgtaaaaactcttcttatagaagcctgtcatgacactgtctctcttctccaacatactcaccagcacacatgtagactagattagaacctcctgtttttctttttcatacttttctctatcatgcttccctccattataatatttttattatgtgtgtgaatgtctgccccaagtcagtttcctcactaaactataaactccgtaaagctgggatccttccaattttgatcaccacttagtacagtaggaacacagtaaagattcaattggtatttgtggaatgaatgaatgaattgttttgctagtaaagtctgggggaacccaggtgagaagagcctagaaagcaggtcgaatccaaggctagatagacttagtgttactcaagaaagggtagcctgaaaataaaggttcaaattatagtcaagaatagtcaagacatgggcaagacaagagtgctgtcatcaagtgtgaagaacaaagggaagtcagtaaccccagatgactaatgaaggggacaggagcagcttcagctgcagttcatgcaatgggtctaggcaagtggcttagggctgaactgtgcacagtgtaaggggcttagaggacctactttatgtggcccaggggccagacttagagttcaagggagaatttgagcccatctcttattagttacaggaatttaacaccatctcttattacctacaagaactagagcaggccaagcgtggtggctcacgcctgtagtcccagcactttgggaggccgaggcaggtaaatcacttgaggtcaggagttcaagaccagcctggccaacgtggtgaaaccccatctgtactaaaaatacaaaaattagctgggcatggtaaagtgtacctgtaatcccagctactcgggaggctgaggcagagaattgcttgaacctgggaggtggagcctgcagtgagctaagattgagccaccgcactctagcctgggtgacacagtgagactctgtctcaaaaaaaaaaaaaaaaaggaactagaacaaatcaatcactgtatctctctgagcccactgagcccattgacttcacatgcaaaatggggttatatatcaacacgtacccctacaacaagatagcatagtataaaacaatattatgtgtgtgaaggaggtacatgtttcttccaagttctactcagttcttctaagaagcttctactcagacatgagttctgcctgttgtttgtgtttttctcaaggaacgtttagtgttgtattgctgttagattgctgccttacatatcctccattgactagaagcttcttgaagggaagaagcatgtcttattcaccgtaattttgtcgagcttctggtagcatgcaggttgagtcgggagataaaaatgccaggccttcaggggtttgatgtatgaatgaggaccatgagattataaatcagctacaaggctccatgtgatctctccataagcatccactccttggaagctgtctgactttattcgtctgtatggcacaaaagagacacttggtaaatattgaatgaactgatgaatgaatgaatgaattcgcctttggttaggcatagcaataaagaaaatgaaatttaactttgtcttctagactttgaatgcctctgccaacaactaaatatcttccagggagggcagatggcggcctgtacaatgaacaatttaatctttagaaactggaacaactttgccagcaaactccatttttctctacgaacacattgtcaataacatgtgctctcaaatatgtggtgaaattgatgactgggccctgatttatagaaacaacaacaaattaaatgtttacctttctctttcctagcttggggtccttcagaccagccatgaatttttttttcctgtgctctaataatagaggaggtttaattacaatgctccatcgtgtgattgtgtgtggagtggaagcaaagcaaaatgtccagggtatcttaatttaaaaccaggaggggaaaagccacttatgtgataatgaagattaacgtagggagccgctggctctcccttctcacataaaagcagatattgggggaatccttcatacaaacatttctgtgaccactcatttagcctcttgtaggaaatcttcttgattttggacaaactcgaagctttagatttgcttgaaaataggccagggtaggagagggatgcccagagaaatggaattctccaaacagtaatcaggctacatgtttgggactattcctgggaatgacagactggtttggaagaagtcaccatcctaggacctcttcttctagaatggtggctctgaactcctacttgggtcaagagcctttttgaaaatatcatgagagctacagattctctctccaggaaaatcaagtctacctataacttcatatacacacatgcaccaaaatgctaaattctgcttacaatgtcatctcttgtctttgccataaacttaaacaacttgagtgacaattgctactgaaaattccaggcttcaccaacctttctgtgatgctcatccaagattaagaactgctagacttagaggacccttggtttctttaggccacaaaactgcttaactgtcttaggctgtggacttctttggctgtctgatgaaacccgtggagccctttaaaatgtctttaaaggccaggcgtggtggctcacacctgtaatcccagcactttgggaggccaaggcaggcagatcacgaggtcaggattttgagaccagcctggccaatatggtgacaccccatctttactaaaaatacaaaaattagccgggcatggtggcacgtgcctgtagtcccagctactcgggaggctgagacagaagaatcacttgaacccaggaggtggaggttgcagtgagctgagatcgtaccactgcactccagcctgggtgacagagtgaaacttggtctcaaaaaaaaaaaaaaagtctttaaaaactaatgttaaatgtgttaatgtggctgtccctttcccatccttcaggtcttcattcagatgtcactccctcagagagggctccctctcccctttctcaaagtagccccatcagaactgaaaccctcccaattgtcccatagaatggatggttatggtttcttttgagtaaacatagaaattgactctcccagtcaatttgagaaagtttcatttgtcttatctgagctcctttctctggaaacctaccctcaggccttgcagacagtatcaaggaactgaaacttaccagatcaccacatctgaacaatgagacagaagacctctcacccattatgactgcctgagcgaccacccacttcatgttgaccaaattctctttcttaccactccctaattcctgttttccttcatgtagttatatttcttccctgctatataaaacccttatttcttgtcagttggagagatagatgagattgacctcccatctcctgagctgcagcacctgattaaagcctttttctctggcaatacttgttgtctcagtggttggcgttatgtgtggcgagcagtaggacctagaccaaacccctggcctttcagtaacgatgcccacacctgcaccactcagtcccatcaccctgcttacggtcttcacagcactcacctcatctgacgtggtcttgatggcttgcttgcttattgtcttctcctccctctggaatgcaaacttaccagaggcagaggtcctatctgtcttgttccttggtgtgtcctctgtatcaaagcggtacccagtaatgggcctgaagcaaatgttttcccaatatttactgaaggaatctatgttcactggtaagtcaagagcaaaaaatacacaaagttttgctacttcacctggtctagtggtcatcgggcattattatttcataaatgtatactaataattttagtagcagttgaatatgtttttctttttttattattattatactttaagttttagggtacatgtgcacattgtgcaggttagttacatacgtatacatgtgccatgctggtgtgctgcacccactaactcgtcatctagcattaggtatatctcccaatgctatccctcccccgccccaccccacaacagtccccagagtgtgatgttccccttcctgtgtccatgtgatctcattgttcaattcccacctatgagtgagaatatgcagtgtttggttttttgttcttgcgatagtttactgagaatgatggtttccaatttcatccatgtccctacaaaggacatgaactcatcattttttacggctgcatagtattccatggtgtatatgtgccacattttcttaatccagtctatcattgttggacatttgggttggttccaagtctttgctattgtgaataatgccacaataaacatatgtgtgcatgtgtctttatagcagcatgatttatagtcctttgggtacatacccagtaatgggatggctgggtcaaatggtatttctagttctagatccctgaggaatcgccacactgactcccacaatggttgaactagtttacagtcccaccaacagtgtaaaagtgttcctatttctccacatcctctccagcacctgttgtttcctgactttttaatgattgccattctaactggtgtgaaatggtatctcattgtggttttgatttgcatttctctgatggccagtgatgatgagcattttttcatgtgttttttggctgcataaatgtcttcttttgagaagtgtctgttcatgtccttcgcccactttttgatggggttgtttttttcttgtaaatttgtttgagttcattgtagattctggatattagccctttgtcagatgagtaggttgtgaaaattttctcccattttgtaggttgcctgttcactctgatggtagtttcttttgctgtgcagaagctctttagtttaattagatcccatttgtaaattttgtcttttgttgcctttgcttttggtgttttagacatgaagtccttgcccatgcctatgtcctgaatggtaaagcctaggttttcttctagggtttttatggttttaggtctaacgtttaagtctttaatccatcttgaattgatttttgtataaggtgtaaggaagggatccagtttcagctttctacatatggctagccagttttcccagcaccatttattaaacagggaatcctttccccattgcttgtttttctcaggtttgtcaaagatcagatagttgtagatatgcggcattatttctgagggctctgttctgttccattgatctatatctctgttttggtaccagtaccatgctgttttggttactgtagccttgtagtatagtttgaagtcaggtagtgtgatgcctccagctttgttcttttggcttaggattgccttggcgatgcgggctcttttttggttccatatgaactttaaagtagttttttccaattctgtgaagaaaggcattggtagcttgatggggatggcattgaatctgtaaattaccttgggcagtatggccattttcacgatattgattcttcctacccatgagcatggaatgttcttccagttgtttgtatcctcttttatttctttgagcagcagtttgtagttctccttgaagaggtccttcacatcccttgtaagttggattcctaggtattttattctctttgaagcaattgtgaatgggagttcactcatgatttggctctctgtttgtctgttgttggtgtataggaatgcttgtgatttttgcacattgattttgtatcctgagactttgctgaagttgcttatcagcttaaggagattttgggctgagacaatggggttttctagatatacaatcatgtcatctgcaaacagggacaatttgacttcctcttttcctaattgaataccctttatttccttctcctgcctaattgccctggccagaacttccaacactatgttgaataggagtggtgacagagggcatccctgtcttgtgccagttttcaaagggaatgcttccagtttttgcccattcagtatgatattggctgtgggtttgtcatagatagctcttattattttgaaatatgtcccatcaatacctaatttattgagagtttttagcatgaaaggttgttgaattttgtcaaaggccttctctgcatctattgagataatcatgtggtttttgtctttggctctgtttatatgctggattacacttattgatttgcctatattgaaccagccttgcatcccagggatgaagcccacttgatcatggtggataagctttttgatgtgctgctggattcgttttgccagtattttattgaggatttttgcatcaatgttcatcaaggatattggtctaaaattctcttttttggttgagtctctgcccggctttggtatcagaatgatgctggcctcataaaatgagttagggaggattccctgtttttctattgattggaatagtttcagaaggaatggtaccagttcctccttgtacctctggtagaattcggctgtgaatccatctggtcctggactctttttggttggtaagctattgattattgccacaatttcagctcctgttattggtctattcagagattcaacttcttcctggtttagtcttgggagagtgtatgtgtcgaggaatttatccatttcttctagattttctagtttatttgtgtagaggtgtttgtagtattctctgatggtagtttgtatttctgtgggatcagtggtgatatcccctttgtcattttttattacatctatttgattcttctctctttttttctttattagtcttgctagcagtctatcaattttgttgatcctttcaaaaaaccagctcctggattcactagttttttgaagggttttttgtgtctctattatttccttcagttctgctctgattttagttatttcttgccttctgctagcttttgaatgtgtttgctcttgcttttctagttcttttaattgtgatgttagggtgtcaattttggatctttcctgctttctcttgtgagcatttagtgctataaatttccctctacacactgctttgaatgcgtcccagagattctggtatgttgtgtctttgttctcgttggtttcaaagaacatcttcatttctgccttcatttcgttatgtacccagtagtcattcaggagcaggttgttcagtttccatgtagttgagcggttttgagtgagattcttaatcctgagttctagtttgattgcactgtggtctgagagatagtttgttacaatttctgttcttttacatttgctgaggagagctttacttccaagtatgtggtcaattttggaataggtgtggtgcggtgctgaaaaaaatatatattctgttgatttggggtggagagtcctgtagatgtctattaggtccgcttggtacagagctgagttcaattcctgggtgttgactttctgtctcattgatctgtctaatgttgacagtggggtgttaaagactcgcattattaacgtgtgggagtctaagtctctttgtaggtcactcaggacatgctttatgaatctgggtgctcctgtattgggtgcatatatatttaggatagttagctcttcttgttcaattgatccctttaccattatgtaatggccttctttgtctcttttgatctttgttggtttaaagtctgttttatcagagaccaggattgcaacccctgcctttttttgttttccatttgcttggtagatcttcctccatccttttattttgagcctatgtgtgtctctgcacttgagatgggtttcctgaatacagcacactgatgggtcttgactctttatccaatttgccagtctgtgtcttttaattggagcatttagtccatttacatttaaagttaatactgttatgtgtgaattttatcctgtcattatgatgttagctggtgattttgctcgttagttgatgcagtttcttcctagtctggatggtctttacattttggcatgattttgcagcggctggtaccggttgttcttttccatgtttagcgcttccttcaggagctcttttagggcaggcctggtggtgacaaaatctctcagcatttgcttgtctgtaaagtattttatttctccttcacttatgaagcttagtttggctggatatgaaattctgggttgaaaattcttttctttaagaatgttgaatattggcccccactctttctggcttgtagggtttctgccgagagatccactgttagtctgatgggcttccctttgagggtaacccgacctttctctctggctgcccttaacattttttccttcatttcaactctggtgaatctgacaattatgtgtcttggagttgctcttctcaaggagtatctttgtggcgttctctgtatttcctgaagctgaacgttggcctgccttgctagattggggaagttctcctggataatatcctgcagagtgttttccaacttggttccattctccccatcactttcaggtacaccaatcagacgtagatttggtcttttcgcatagtcccatatttcttggaggctgtgctcatttctttttattcttttttctctaaacttcccttctcgcttcatttcatcttccatcgctgataccctttcttccagttgatcgcatcggctcctgaggcttctgcattcttcacgtagttctccagccttggttttcagctccatcagctcctttaagcacttctctgtattggttattctagttatgcattcttctaaagttttttcaaagttttcaacttctttgcctttggtttgaatgtcctcccgtagctcagagtaatttgatcgtctgaagccttcttctctcagctcatcaaagtcattctccgtccagctttgttccgttgctggtgaggagctgcgttcctttggaggaggagaggcgctctgctttttagaatttccagtttttctgttctgttttttccccatctttgtggttttatctccttttggtctttgatgatggtgatgtacagatgggtttttggtgtggatgtcctttctgtttgttagttttccttctaacagacaggaccctcagccacaggtctgttggaataccctgccgtgtgaggtgtcagtgtgcccctgctggggggtgcctcccagttaggctgctcgggggtcagggacccacttgaggaggcaatctgcccgttctcagatctccagctgcgtactgggagaaccactgctctcttcaaagctgtcagacagggacatttaagtcttcagaggttactgctgtctttttgtttgtctgtgccctgcccccagaggtggagcctacagaggcaggcaggcctccttgagctgtggtgggctccacccagttcgagcttcccggctgctttgtttacctaagcaagcctgggcaatggcgggcgcccctcccccagcctcgctgccgccttgcagtttgatctcagactgctgtgctagcaatcagcgagactccatgggcgtaggaccctccgagccaggtgcgggatataatctcctggtgcgccgttttttaagcccgtcagaaaagcgctgtattcgggtgggagtgacccgatttccaggtgcgtccgtcacccttttctttgattaggaaagggaactccctgaccccttgcgcttcccaagtgaggcaatgcctcgccctgctttggctggcgcacggtgtgcgcacccactgacctgcgcccactgtctggcactccctagtgagatgaacccagtacctcagatggaaatgcagaaatcacccgtcttctgcgtcgctcaggctgggagctgtagaccggagctgttcctattcggccatcttggctcctccccctcctgtcacagttgaatatgtttttcagataaaatcttctacagtacccaatatataaaacagatgaatataaatgagagtaagaagttccaaaaagactctctcagacacacactcctgcatgcccttgttggaaatttctacatcccattctcttctgagaagctcttttaaagtccttcttctggtctaaaattaacatctgagattgctcttcttcattaattacttcatggttaccaggaagctagttctgctcagtaagagatgtaagttatggaggtgacaatttccaacaaactctttttgaaacatctaggggattttctttcccaaacacattggtaaacctattcaaaactgaattctaaaagagagctatggcccaggagcagtggctcatgcctgtaatcccaacactttgggaggccaaggaaggcggatcacttgaggtcaggagttcgagaccagcctggccaacataaagaaaccctgtctctactaaaaatacaaaaaaaaaagaaaaaaagaaaaaaaactagcagggcatggtggcgggcacctgtaatctcagctgcttgggaggttgaggtggaagaatcacttgaacctgggaggcggaggttgcagtgagccaagactgtgccattgtactccagcctgggtgacactgcaaaaccctgtctcaaaaacaaaacaaaacaaaaattcattttcttataaggacaccagtcagattggattagggcccatcttaacagcctcatgtttacttaattacttctttaaagattctgtgtccaggcagtcacattcagaggtgctggggcttagggcttcaatgtaagaattcggtggggacacaattcatacccacaacactggcctccacgctgttggtcaataaagcttttgttgttattcctttaccttccctactgccaccctgccccagccctggcttcagaaggagcagcttgtagctatgggaaccttctacgcaagcttcccattaacttcatttagcttcatttatggctgtgcttgggaggactgaacattttctagtaaatgttataaggaaagcatttaaaatacatatcatagctgctcaacagctgatttgggggtggaggaaagccttgaattactttgagaaagaaagcctggttccatgtttctgcagtgcacaaataggatggcagaacacatgcttggaagcttccaccaggaggtcacatgagccagtggttaaggggcaggggtgatgggagcaagtaaaaagggatccaaatccaggttccacctctaataaccatagtgaccccaactacttgtggtcccatgagccagttgacccttctgcataatggtcatgctgatcatccccatctcccttttgttgtgggggcctctctgttcatgtaaagtgcctcacacaatgcctggtataaggtaagtccacaataactgataacagctattgttgttatcactgaaatgcaaataaatcaacagagcccagggactcaaaggtcttgtacaactagaccactttggctctggattgtacataagatttgctgcctttatatgcagtggtgcactgcacttctaaaataaatatttgtgtatgcttgtgaaggaacttagtctatctagaaatgcagttttaggattgggtgcagtggctgatgcctgcaatcttagcactttgggtagagacaggagaatcacatgagcccatgagcctaggagtttgagactagcctggcaacatagggagacccctgtcttgaaagacagagagagagaggaaggaaggaaggaaggaaggaaggaaggaaggaaggaaggaaggaaggaaggagggagggagggaaggaaggaaggaaggttggcttagggggtagggagaggaaagaaagagagaaggaagagaggaatgtcgtagaattatagaagttatgtgttctaccatgtctctgaaagaaggattaactgattaaatggtagaaataagtgaataaatgaatcctatctgagagcagtagttctcaatcttggtagtgcattagaatcccctgaggaacttttaaaaaccccgggcccaagtcataccctggactagtcaaggcaaaaccttggggagtagggcccaggcatccacaggtgactcctacctggagtggggccaagtgacagaatctgcttagaggcgggagcctcagctggacatctctgagtcacttattaggtgtgaacttggtcaagttgcttaacatctctgagccttgatttcctcctctatcttgaggattaaataagatataattggtaaaacacaggctccctatcgacaatggaccgaagtgctgaatagcaggtgtttcccattattaccgccatcattgccatccagtgcgtaagcctgagcctccatgtcaccacccgcaaaatggtaggggagaaaggatgcctgaagaccctttactttcattctgatgattctatcaaggtagagcaatgggccaagtcaacagaaaagttcacctgtcttcaccaagtgacagccatggaccaggagccatggtggcaactctggagactgttgcacaaacagtcccacctctgctctcctagaacctgaatgctagtggggagacatgtcaaacagtgctcgtccagaccaatatattattcatgacaagagggatctaagagagaggaaatctgaggacctcatctggatcccaggagaagaaaagatctttctgacaacgagctctttaaaccaggggatgaatgtggagtaggaactgtctaggtggagttgtgagaagggcccttcaggcaggggtagaacaggagcaaaggctgtgaggagggaaggagcttggattttttttttctaagagacaaattctctctcattgcgcaggctagagtgcagtggtacaaccatggctccctgcagcctctacctcccagctcaagtgattctcctacctcagcctcccaagtagctggaactataggtgcacaccaccatgcccagctaacttttttactttttactttttgtagagacagggtcttgctatgttacccaggctggtgtcaaactcctgggctcaagagtcctcctgcctctgcttcccaaagtgctgggattacaggtgtcagccaccacgcccagtcagtatttttctttctaagagacacagtctcactctgtggcccagtctggagggcaacggtgtggttacagctcactgcagccttaaactcctgggctcaaatgatcctcctgcctcagccttgcaagtcactgggattacaggcatgagccaccacgctcagcttagaggtagacatatttgaggtgcttttacttaaaacatggatacttgaacttttaaaagcatctttttttcttagagcatcctgggcaacttgggttccccataacatacttcaggaaagggcaggggagcccagtgaggccagggttgagctccagacaaatcttgatttcattccagcttcactgggaaatggctgtgtgaatgcaggggacaatttaacctcccgaaacttcatccataaggagaaagtaagaactcatattttgccactcatttgtaaaaattggtaattattgataataatcaaattggtaaagggaaatagttattacttttgtgtgtgtgtgtgtgtgtgagacagagtctcgctctgtcacccaggctgaagtgcaatggcgcgatcttggctcacagcaacctctgcctcctgggttcaagagattctcctgtctcagcctcccgagaagctgggactacaggcacccaccaccacacccgactaatttttgtatttttagtaaagacgagttttcaccatgttggtcaggctggtcttgaactcctgacctcaagtgagccacctgcctcggccttccaaattgctaggattgtaggcatgagacaccgcacccagccagaaatctttattactatgaagcagcagggtacattggtgacagaaacctgagttcaaatcccagctctgctacttcccaggcatgtgctgttggtcctggtacttagatctctgaccctcagttttctgatctctcaaaaagaaaaaggagtttataagagctatctttaagggactattataacaattaaataaaacaatagcagtcaagcttcaggcaaaagatggaaactcaataaatgaaaactaccattaaaatgaatacaaactcttcttaggaagagggtttggctgaattatttaagtgtgtgttccaatctaccaaccctcttttccagtgtagacacaaccacaaacatcgccaccatgagcttagacatataatcacagtggttaaaaaaaaaaaaaaaaaagactgtaatcccagcactttggggggcccaaggcaggtgaatcacaagggtcaggagttcgagactagcctggccaagatggtgaaaccccgtctctactaaaaatacaaaaattagctgggtgtgatggcacatgcctgtaatcccagccacttgggtggctgaggcaggagaaatcacttgaaccggggaggcagaggttgcagtgagccgagatcgtgctgttgcactctagactgggcgacagagcaagactctgcctcgaaaaataaaaataaaaaaaaaaaaagaaagagaaaaaggaaaaaaaaaaaagtctaccttgtttatgtccatacttggagggcataccgttcttattaaatgccagcaactcacattttaggcagcagtaaagtcccctagctgtgtccatgcagtgaatctcgttgggctgtaagttagctgcaataaataacattggctctgcactccacttagagaagatgggttcactgtgaatcatgttgttggcggtttggactttaagctgtccaggttgtttatggtggtgtttgccagcatgtagacctctttcaaacaatttaagtgctcttttggagtatacgaatgtggctcaataaaaatgggtacaggaaaattgcctcctttctctcttctatggccataccccaaaagcaaccatatatgacaattgtcaagtgttaagtataattgctcaacatgaaattataattaacactgaagccaccagggacattttctctctccattgtcaggatgttgtcctgatctggatgttgtcctgatctttgtgacccttttaatttatcttttgaaaggatggcaacagctgggtagtttttcaatccttatcattttgcattatatagctttactgagcaatgtgcctttggaagattctagttagtttcattgacagcaataaatactggttagagaacaggctttgaagtcaggcagacctaagcccaaaggctggctctcccacttgctaactatctgatcttgattacatttcttagccaatccaaggctctctcttctcatcaacaaatacagacaatgaaatctactgtcaggtagtactgaggaaggcagagcttctaacaagcacttaataaaatggtagatattatgactgttttctgctttcttcttcttaatatccacatcaaatgttttgaaatgctattttctccttttttataaaaagggaaaaattttcttagcttcccttctgaattgacaactgatttcttttcaacatttgtttaatgcagcaacgaaagagctttttgacttcattttttaaatttccagaaggaaagagtggtctattttccaagacctaatgactacttatttgtaacacataagcagaattttatgcatgtatttttaatttattctacatctcattccacagcagttttaagatactgtactatatgcaatgcagcaaaattataaaagaaataatagaaatcattaaagatatctacatttcgttaagcacttattgaacgccaggcaacatttgtgaaaagtactatatattattatcctgattttgctgatgcggaaactgagattaagaaaaggtaagttatgtcccccaatatcacacagctagtaaatggcagagccaaactattaacacatataccaaaggaaaatggaaagagaatatcaaaagaagtttacaggtatagactgcagccttaggaggctacataattactaaagttgggccaccaatttgactctgagcttcctggtagtgaaagcaagaatgcaaacatgatccatcccaagaaccacctttccatgaggatatgtgtaccaggctttaaaagcaagcaacgtcttccctaatacgtagtgtctggaagagatttatgacataacttttgtgacatagtcaaatgcaacagagacgacaggaggttcccgtgatagaaccaaatatttgaaactaaaaaaaaacattctttctgtaaaagaaaaaaaaataacaccactccttcctgcaaaaatgttttacttaacactgggctccatctcttttttataattattcaatccaagctttgtcaaagcatcatactgagaagagattcatgttaaaaagctagtggaggggggtggagtagatagcagagaatgcctctctgtcttatcatttttatttagattgacatacctttgattataattagggataactgttcagcagttaagactccataatcccatcattagttgtcaggagattttcacagggcaaactctcatgccatttctctcatttctgtttcttaactacttgggcagcctgcagttgaagagtgtgctttatggaaaagattttctgctgccattgaaatcttctaagctgacacacagttaaggacacaaatgaaacctccactcttgggaggccccacatcttcttgcctgacatttttgttgttgttgttctccaagatatcgccctgtttctgctggttgcgttcaacagccattttgcacacactggtgaagagatcttaaaccatttcagaggtggcccataaaggaggcaaaaggggacttgccgtaaaaattatttccatagacatgcaaagttgattatataaggtagaggtcagttaagattctctggcatccattacgagacaaaaaaaaaaaaaaaaaaaaactaaaaaaactctcctccaacttgaaagctgaaggcagtgggtcgtctggtttgtgtcatgaaacatacatcatgcatttgagacacatattacaaattgtactttaaaagaggaagttcagaagttgggattttccagtgtgtcaattatgacccgaatgctatctatatttaaatgttccaagccgactatcatgatcatgtccccttattcttcaagggtctgatgaagtacccctttgacaaggaatgaatggtctcatcagtacagatccaactcaacatcaggaacaattagcttggcagttaaacctaaaggctctgaaatcgatattttatatatatatatatatatatatatatatatatatatatgtacatattctaattgaatgttagaatattcggtttcacttataattattcagataggtcacttcaagtctctaaacctagagaggtttttttctctgtaatattggataccttgttggattgttttaataattaacagaaataatgcatatgtggtggatcaaaaatgacaatcatggccagatgcagtggatcacacctgtaatccccacactctgggaggctgaggtgagtggatcacttgaggtcagaagttcaagaccagcctggccaacatggtgaaaccccatctctactaaaaatacaaaaattagctggacatggtggtgcacgcctgtagtcccagctacttgggaggctgaggcatgagaatcacttgaacccaggaggtggaggttgcagtgagccgagatcacgccactgcactccagcctgggtgagtgagactctgtcaagaaaagaaagaaggagggaaggaaggaaggaaggaaggaaggaaggaaggaaggaaggacccaagaaagatagatagagagggaggaagggagggaggaaggaaggaaggaaggaaggaaggaaggaaggaaggaaggaaggaaggacggacccaagaaagatagagaaagagagagggaggaagggagggaggaaggaaggaaggacccaagaaagatagagagggaggaagggagggagggagggaggaaggaaggaaggaaggacccaacaaagatagagaaagagagagggaggaagggagggagggaggaaggaaggaaggacccaagaaagaaaaaaaagagagagaggaaaggaggaaggaaggaaggaaggaaggcaggcaggcaggcaggcaggcagacacaacccagatattactgatatataactgttaaaatgttttcattaactcaaccgttctgaggtttgatagaagaagaaaaaaagagtccctcttgccatttggaaactcagccactttgttctttctggtttattttgtgacctccctttccgacagcaattagtctcagtctctgttgtcaacgctgggaaaactacatggaagaaaggaattaaggaaaggcaatacatcagaaagtgttttaaaatagtatccactcacccacatgaagctgtgtctggcatatcaaaagtaaagtattcaatatatttaagcaattacctgtattttattcactctaagaattgaaatttgtccactaaagttgaagggtttcctcacacagagatttctcttaggaaaaattaaatgaaacactaataatgaaattcagcaatgtagataagccaatttgcatttccaaattgtaattccatttgaaaaatattaactacaggtttctcccaggattacaccgctaagcatcatgtgtctccattgctcctttgcttccttgtcacagtctttttaaaataataacacttggccgggcgcggtggctcatgcctgtaatcccagtactttgggaggccggggtgggcagatcacttgaggccaggagttcaagaatcagcctggccaaaatagtgaaacccgcctcctaaaaatacaaaaattagtcaggtgtggtggtgcgcacctgtaaccccagccactcagaaggctaagacagagaatcgcttgaacccgggaggcagaggttgcagtgagcggagattgcgccactgcactccagcctggatgatagagcaaaaatccatctcaaaaaaaataaataaataaaacactaaatataggtttttcttttttcattttcaaccaaacagctttaagaagccctaaattaggagtcatgtgtcctgacctatcactgaatcaccctgagagcaagttacttaaactccctctgcttcaacttctttatctttggggtactaatatttatccaatatgtttcaaaagagaatgtatatgaatggtctttgaaaaaaatgtaaattgcttcaaaatgacagacaaaattattctttgaacttgaaagcaccaaatagatggcaaagcttctggagtccgcttgtgtttccttgggctatttttccagtctctttccatgctctaagttgtttctttcatagaattagagaaataggattctaggtacatctatttttttttcttttgtattgttttagtgataaatactttaaaacccttcatggtttccatgttagaaaagataggcttcaaattagtgtctttagaactccattcattcaacaagtatttatcaaggacccactctgtgacagatagtgggttttatacttgggactgtgctgtgctcaaactctcaccttcctggagtttacacaggcaggcactaaactcaaaattatatatgcgatgatgtgcttatacgctgcaataagtcttataaggacactgcaaaaggttcatgcaagatgataacaaaagaatgtagtcaagtcctatgggtaagaaaagacttatttgagaaagcaccatctgaactgagacttcaaggatgaaaaggtgctggccaaacaaagagtgggaagaagagcatgctaagcagagggagcagcacgtgcaaagaccctgaggccagtgttcttggtatatatcaagtggcagagggacccaggtgaaggcagagggatggcaagaccagatcaagcaggacattaaaacaagtttgtcttttttctaagtgccgtagacacttttcttttcttttttttttttttttttttgagatagagtttcactcttgttgcccaggctggagcacaatggcatgatctcggctcactacgacctccatctcccagttcaagcgattctcctgcctcagcctcccgagtagctgagattacaggcatgtgccaccacgcccagctaattttgtatttttagtagagacagggtttcttcatgttggtcaggctggtctcaaactcccgatgtcaggtgatctgcctgcctaggcctcccaaagtgctgggactacaggtgtgagcccgcgcccggccaggccattgacagattctaagctggaatgaggagtgacccaacttaatttgagattttataagctcactttgtttgctatatggaaagttatcagaaggacaccaagtggactaaaacagcccactgagcgaatgccacagccatccagggcagataggcgcaggcctgaattgtgtgcacaattgcaggtggccgtggaaatacagttcgggaggatttcatgactagggtcagggtgagccattggatgcgagggaggagtgagggcacagtcaaagacgaccgaactttctggctgaaagttgagtcatatgagttccatttcctgtgaagaggaatacagaggggtacagaataaggattgggggtgcaagcaccctgtttggggaaaggttttattgaagtagttgtgagatcttcacaaacagatgccaagatgccagctggatgttcagatctggaactcacagtcaccagcacgcagacgatatttcaagtttcagaactggaagatgctgcttagaaagagctcctcaggggggagggaggagccaagatggccgaataggaacagctccagtctacagctcccagcctgagcgacgcagaagacggtgatttctgcatttccatctgaggtaccaggttcatctcactagggagtggcagacagtgggcgcaggtcagtgggtgcgcgcaccgtgcgcgagccgaagcagggtgaggcattgcctcactcgggaagcgcaaggggtcagggagttccctttccgagtcaaagaaaggggtgacggacggcacctggaaatcgggtcactctcacccgaatactgcgcttttccgacgggcttaaaaaacggcgcaccacgagattatatcccgcacctggctgggagggtcctacgcccacggagtctcgctgattgctagcacagcagtctgagatcaaactgcaagatggcagtgaggctgggggaggggcgcccgccattgcccaggcttgcttaggtaaacaaagcagccgggaagctccaactgggcccagcccaccacagctcaaggagtcctgcctgcctctgtaggctccacctctgggggcagggcacagacaaacaaaaagacagcagtaacctctgcagacttaaatgtccctgtctgacagctttgaagagagcagtggttctcccagcacgcagctggagatctgagaacgggcagactgcctcctcaagtgggtccctgacccctgacccccgagcagcctaactggcaggcaccccccagcaggggcacactgacacctcacacggcagggtattccaacagacctgtggctgagggtcctgtctgttagaaggaaaactaacaaacagaatggacatccacaccaaaaacccatctgtacatcaccatcatcaaagaccaaaagtagataaaaccacaaagatggggaaaaaacagaacagaaaaactggaaactctaaaacgcagagcgcctctcctcctccaaaggaacgcagttcctcaccagcaacggaacaaagctggatggagaatgactttgacgagctgagagaaaaaggcttcagacgatcaaattactctgagctacgggaggacattcaaaccaaaggcaaagaagttgaaaactttgaaaaaactttagaagaatgtataactagaataaccaatacagagaagtgcttaaaggagctgatggagctgaaaaccaaggctggagaactacgtgaagaaggcagaaacctcaggaagcgatgcaatcaactggaagaaagggtatcagcgatggaagatgaaatgaatgaaatgaagcgagaagagaagtttagagaaaaaagaataaaaagaaatgagcaaagcctccaagaaatatgggactatgtgaaaagaccaaatctacgtctgattggggtacctgaaagcgatggagagaatggaaccaagttggaaaacactctgcaggatattatccaggagaacttccccaatctagcaaggcaggccaacgttcagattcaggaaatgcagagaacgccacaaagatactcctcgagaagagcaactccaagacacataattgtcagattcaccagagttgaaatgaaggaaaaaatgttaagggcagccagagagaaaggtcgggttaccctcaaagggaagcccatcagactaacagcggatctctcagcagaaaccctacaagccagaagagagtgggggccaatattcaacattcttaaagaaaagaattttcaacccagaatttcatatccagccaaactaagcttcataagtgaaggagaaataaaatactttacagacaagcaaatgctgagagattttgtcaccaccaggcctgccctaaaagagctcctgaaggaagcgctaaacatggaaaagaacaaccggtaccagccgctgcaaaatcatgccaaaatgtaaagaccatccagactaggaagaaactgcatcaactaacgagcaaaatcaccagctaacatcataatgacaggataaaattcacacataacagtattaactttaaatgtaaatggactaaatgctccaattaaaagacacagactggcaaattggataaagagtcaagacccatcagtgtgctgtattcaggaaacccatctcaagtgcagagacacacataggctcaaaataaaaggatggaggaagatctaccaagcaaatggaaaacaaaaaaaggcaggggttgcaatcctagtctcagataaaacagactttaaaccaacaaagatcaaaagagacaaagaaggccattacataatggtaaagggatcaattgaacaagaagagctaactatcctaaatatatatgcacccaatacaggagcacccagattcataaagcaagttctgagtgacctacaaagagacttagactcccacacattaataatgggagactttaacaccccactgtcaacattagacagatcaacgagacagaaagtcagcaaggatacccaggaattgaactcagctctgcaccaagtggacctaatggacatctacataactctccaccccaaatcaacagaatatacatttttttcagcaccacaccacacctattccaaaattgaccacatacttggaagtaaagctctcctcagcaaatgtaaaagaacagaaattataacaaactatctctcagaccacagtgcaatcaaactagaactcaggattaagaatctcactcaaaaccgctcaactacatggaaactgaacaacctgctcctgaatgactactgggtacataacgaaatgaaggcagaaatgaagatgttctttgaaaccaacgagaacaaagacacaacataccagaatctctgggacgcattcaaagcagtgtgtagagggaaatttatagcactaaatgcccacaagagaaagcaggaaagatccaaaattgacaccctaacatcacaattaaaagaactagaaaagcaagagcaaacacattcaaaagctagtagaaggcaagaaataactaaaatcagagcagaactgaaggaaatagagacacaaaaaacccttcaaaaaattaatgaatccaggagctggtttcttgaaaggatcaacaaaattgatagaccactagcaagactaataaagaagaaaagagagaagaatcaaatagacgcaataaaaaatgacaaaggggatatcaccaccgatcccacagaaatacaaactaccatcagagaatactacaaacacctctatgcaaataaactagaaaatctagaagaaatggataaattcctcgacacatacactctcccaagactaaaccaggaagaagttgaatctctgaatagaccaataacaggatctgaaattgtggcaataatcaatagcttaccaaccaaaaagagtccaggaccagatggattcacagccgaattctaccagaggtacaaggaggaactggtaccattccttctggaactattccaatcaatagaaaaagagagaatcctccctaactctttttatgaggccagcatcattctgataccaaagccaggcagagacacaacaaaaaaagagaattttagaccaatatccttgatgaacattgatgcaaaaatcctcaataaaatactggcaaaacgaatccagcagcacatcaaaaagcttatccaccatgatcaagtgggcttcatccctgggatgcaaggctggttcaatataggcaaatcaataagtgtaatccagcatataaacagagccaaagacaaaaaccacatgattatctcaatagatgcagagaaggcctttgacaaaattcaacaacacttcgtgctaaaaactctcaataaattaggtattgatgggacgtatttcaaaataataagagctatctatgacaaacccacagccaatatcatactgaatgggcaaaaactggaagcattccctttgaaaactggcacaagacagggatgccctctgtcaccactcctattcaacatagtgttggaagttctggccagggcaattaggcaggagaaggaaataaagggtattcaattaggaaaagaggaagtcaaattgtccctgtttgcagatgacatgattgtatatctagaaaaccccattgtctcaccccaaaatctccttaagctgataagcaacttcagcaaagtctcaggatacaaaatcaatgtgcaaaaatcacaagcattcttatacaccaacaacagacaaacagagagccaaatcatgagtgaactcccattcacaattgcttcaaagagaataaaatacctaggaatccaacttacaagggatgtgaaggacctcttcaaggagaactacaaaccgctgctcaaggaaataaaagaggatacaaacaaatggaagaacattccatgctcatgggtaggaagaatcaatatcgtgaaaatggccatactgcccaaggtaatttacagattcaatgccatccccatcaagctaccaatgcctttcttcacagaattggaaaaaactactttaaagttcatatggaaccaaaaaagagcccgcatcgccaaggcaatcctaagccaaaagaacaaagctggaggcatcacactacctgacttcaaactatactacaaggctacagtaaccaaaacagcatggtactggtaccaaaacagagatatagatcaatggaacagaacagagccctcagaaataatgccgcatatctacaactatctgatctttgacaaacctgagaaaaacaagcaatggggaaaggattccctgtttaataaatggtgctgggaaaactggctagccatatgtagaaagctgaaactggatcccttccttacaccttatacaaaaatcaattcaagatggattaaagacttaaacgttagacctaaaaccataaaaaccctagaagaaaacctaggctttaccattcaggacataggcatgggcaaggacttcatgtctaaaacaccaaaagcaatggcaacaaaagacaaaattgacaattgggatctaattaaactaaagagcttctgcacagcaaaagaaactaccatcagagtgaacaggcaacctacaaaatgggagaaaattttcacaacctactcatctgacaaagggctaatatccagaatctacaatgaactcaaacaaatttacaagaaaaaaacaaacaaccccatcaaaaagtgggcgaaggacatgaacagacacttctcaaaagaagacatttatgcagccaacagacacctgaaaaaatgctcatcatcactggccatcagagaaatgcaaatcaaaaccacaatgagatactatctcacactagttagaatggcaatcattaaaaagtcaggaaacaacaggtgctggagaggatggggagaaataggaacacttttacactgttggtgggactgtaaactagttcaaccattgtggaagtcagtgtggcgattcctcagggatctagaactggaaataccatttgacccagccatcccattactgggtatatacccaaaggactataaatcatgctgctataaagacacatgcacacatatgtttattgtggcattattcacaatagcaaagacttggaaccaacccaaatgtccaacaatgatagactggattaagaaaatgtggcacatatacaccatggaatactatgcagccatgaaaatggatgagttcatgtcctttgtagggacatggatgaaattggaagtcatcattctcagtaaactatcgcaagaacaaaaaaccaaacactgcatattctcactcataggtgggaattgaacaatgagatcacatggacacaggaaggggaatatcacactctggggactgttgtagggtggggggaggggggagggatagcattgggagatatacctaatgctagatgacgagttggtgggtgcagcgcaccagcatggcacatgtatacatatgtaactaacctacacaatgtgcacatgtaccctaaaactttaataaaaaataaataaaaaataaaaataaataaataaatttagttatcagattaaaaaaaagaaagagctcgtggggagcagaggtcctccgcctttgcagactcactgttgacattttaggacaagcattttataacttccttttaccatcctgaaataaaatttctagatcgggtggccagcctacacacaaaccgcaaaaagaaatcatctaataaaaaagaaaggggcctggcacagtgacttacacctataatcccagcactttaggaggcccaggtgggtggatcacttcggatcagggattccagaccagtctggtcaacatggtgaaaccccatctctactaaaaatacaaaaattagccgggtgtggtggcgcatgcctgtaatcccagctactcagtagactgaggcaggagaatcacttgaacccaggaggcggaggttgcagtgagccaagatcgcgccactgcactccagcctgggcaacagggcaagactctgtctcaatttaaaaaaaaaaaaaaaaaaaggagaaaattgagacatgaaaatgcaccagaacagggcttctcaaactcgagcatgtacaaaaattgcccaaacattctattaaaatgcaggttccaaatcagcagcttggggtgggccctgtattctgcatttctgacaagctctaggtgatcccagtactgctgttatatggaccaccctcagagtaacaacatcctagaagatgtaatgaggcagtcagatgtgcgccataggcagactcaccgtgaacatgtcagtggtaaacgcagagcaatatgggtggattgaatgggggtcttgaggatcatgaacagtaatacaaaggtgacttgattttctaaaatggcaaataactcccattaaattccaaataaagcaaaatacaggttctctttgtcagataagctttatttctggaaattacaatgtgtgttaaactgtgcagaaaagactttgtgtttatatgtaaaacagagttaagttctagcctcagataattataaaaaggttttgaaccaaagacaattttgtcctccacgcccaatgggcatttgacagtgtctagacacaacttcagttgtcacaactcaggggtaaagcagatgctgctggcatctagtgggtagaagccagggatgaggctgaatatctacaatgcatagacgggcggcccccaccaaaaggaagtatctatctggctgaaaatattaacagggccaagttagagaaaaactggcttgcagagatattttcaaaaatggtacagactgagagtaatggctcacacctataatcccaatactttgggaggacgaggcgggaggatcactcgagcccaggagttgaagaccagcatggacaacataacccaggtttttgttttttttttttttttgagatggagtttcactcttgttgcccaggctagagtgcaacgatgtgatctcgactcactgcaacctccacctgctgggttcaaatgattctcctgccccagcctcctgagtagctgggattacaggcgcctgccaccaccaccagctaatttttgtatttttaatagagactgggtttctccatgttggccaggctggtctttaactcctgacctcaggtgatccacctgcctcagcctcccaaagtgctgggattacaagcatgagccaccgtgcccagccaacccaggtgtttttgtagagactccatctctacaaaaaaatttaaaaattagcctactgtggtggcatgcgcctgtagtaccagctactcaggcagctgaatcaggaggttcacttgagcccaggagatcaaggctgcagtgaactatgatcgtgccactgcactccagcctgaatgacagagcaagaccctaccttctaaaaaaaaaaaaaagaaaaaaataaaaaatgggtgcaggatgatggacaacagcaccttgtgtgaaactgtctcacacattgcaaggagcctcacgttcccagcccctaaccactaaatgccagcagtgcccccttttagcaaccataagacatgccctaaaaatgggagtgtcgcataagaacaacagcagagagtgaagagagaagggggtaggcaggaggaaggcaagaagagtaggagccagccaaaatgctgtgccaggggatgagaaaggctggcatggccaaattaaagcatatgtcattctacgcatctgttggtggctctgtaattaatacaaaaataattacatctcttcgcctggctctccctcacaaactacttaatgaacactgccaagaactttttagatatgtaattaaattttttatttatttccattttatttttatagtagtagctcaatatattagaaaaaaaaatgcagcagcaaagcccagcctcaactaccatttgagaggcaactaacagtatccacttcctttttttctcaatctgttctatgcaattcattctgaacagcaggaaatactaacaacagttctcttattccccttcccttcatttttcaggtttaattatctgccaggatctcctctttaggcacagagagaaatgaggtttttactttacttttcttttaatataagaaataatttggctaggcacggtgcctcatgcctgtaatcccaacactttgggaggtcaaggcaataggattgcttgagttcaggagttcaagactagcctgggcaacgtggcgaaaccctgtctctacaaaaaatacaaaaaaattagccggatgtcctggtgcacacctgtggtcccagcttttcaggaggctgaggtgggaggatcacctgagcccaggaggcagaggttgcagtgaacaaagatcatgccactgtactcaagccactctgggtgacagagtgagaccctgtctcaaaaaaaatagaaaaaaaaaagaattttaaaaaaataatagtgtgttgtcccaaagtggtccaagatttggatcttctctttacccttcttcaagtataggaacactgacctttccaaaagcccccaccacttccatcagtcatggtgggatccaggagacttctccaatagaaatactcccatagctaagtttcataaaagacataggtatctgaaatttaaaagtaactatactcagataatggccgggtgcagtggcttacgcctgtactcccagcacttcaggaggccgaggtgggtggatctcctgaggtcgggagatcgagaccagcctgaccaacatggagaaagcttcatctctactaaaaatacaaaattagccaggcatggtggcgtatgcctgtaatcccagctactcgggaggctgaggcaggagaattgcttgaatccgggaggtagaagttgcagtgagtcgagatatcgtgccattgcactgcagcctgggcaacaagagcgaaactccatctcataaaaaaaaaaaaaaaaaaaaaaaaaagtaactatactcagatattcttgggaaaacgcctctaaatcactaataatgtcaatgttcagcacttgaaaacaataccaaattattacaagccgtataagaagcagtggttgaagagacaagaatgaccacaggcccaacatctttacatctcttaaccctctgtttcctaggttgaaagtgtagaaattatgatctcctgaactgcagcattgtgaagttgacacaaggtgaagcaatgtcacattgtcaccacaacaggatcctttcatgctgagatccaaaaaagccagataacctgagtcaagaatcacagaaagtcaataacaaaatcaggactgaggtcttgagaactggaaaacttccttggttttcacacaggaatctgtcatttgtgcttatttcacattgcatgcctgtatcaaaacatctcatgtacaccataactatatacacctactatgtgcacacaaaaattaaaaatagggctgcacatggtggctcacgcctgtaatcccagcactttgggaggccaaggcagggagaatggcttgagcccaggagttcaagaccagcctgggcaacgtggcgaaaccctgtctctacaaaaaatacaaaaaaattagccaggtgtgctggtgcacacctgtggtcccagtttttcaggaggctgaggtgggaagatcacctgagcccaggaggcagaggttgtagggagccaagatcaagccactatactcaagccggggcaacagagtgagactctgtctcaaaaaaaacagaaaaagaaaaagaaataatttttaaaaaataataatgtgttttcccaaagtggtccaagattcagatcttctctttacccttcttcaagtgtaggaacactgaccttaccaaaagcccaccagttccatcagtcatggtgggatccaggagacttctccaatagaaatactcccatagctaagttttataaaagacatagttatctgaaattttaaaataactatactcagataatggccaggtgcagtggctcacgcctgtaatctcagcactttgggaggccaaggcggggagaatggcttggcctgggcaacatggcaaaaccctgtctgtacaaaaaatacaaaagaataaaccaggtgtgctaatgcacacttgtcccagcttttcaggaggctgaggtgggaggatcccctgagcccaggaggctctacaaaatacaaaacttagccgggcatggtggcgcacctgtagtcccagctactcaggaggctaacgtgggaggatggattgagcccaggagatcgaggctgcagtcagctgtgattgcaccactgcactctagcgtgggtgacagaacaaaaccctgtcccccacctcccccatccccaaacaaaacaaaacaaatttttaattaaaaaattaaaaaacaaaaaggatctgtcatgaaggtatttttcagcaaacaacactcaggtatatttgtgaatcttaaatagggaagaaaagagttatcaaataaacctggcaagtactgagttaagtaaagacacactatgtttggtttgattttaattgcaggacttctcagagtctttaatatgttaatgtgtgttgtgaatttccaagacaggaactataataaaatcattattttctttctccttactttcattcccaggacaaactttgccctaagagaaactcagttagaaaagtctgggtgttgatttaatgtggagccacttcaaggaagtgataataaaacaaagttccatgaaattgatatcatattaatatcatggtcaaagaggagaaaatgacagcctgcagtaggcctggtgtgaaacagtccttcagccaggacttcactcttgtttcacagtgtaatgccattgcagtttccaaaagtccaccaatttgtggtctccacttttcctttgacccatctctcttcttccaaccacatgatcaccctcctttaagcttctagacctgccagaggatctcaaccaactcaaaacaaagattgccagggaccctttttctctcaagtgcacatctaatgtcaaagggaaatggttctctccactgatggtgatcaaggcattcacctgtaatctaggtagggtggtgcctgtcatgagcttggaagcttcagagtaggaaggactaaatttaaagccatcctctgctttttattagctgtgaaccctaggacaagtcacttacttttatctctctctttttttttttttttttttttaagacagagtctcactctgttgcccaagctggaatgcagtggtgcgatcttggctcactacaacctccgcctcccaggttcaagcgattctcatgcctcagcctcctgagtagctggaatttcagaggtgcaccaccatgcccagctaatttttgtgtttttagtagagacagagtttcgccatgcttactaggctggtcttgatctcatagcctcatgtgatccgcccgccgttgcctcccaaggtgctgggattacaggcgtgcaccaccatgctcgtcctttatctctcatttttaaaatgagattgtttcaagagttaacagtaatgtgtataaagtgactggaatttggtagatacataataactggttgctagtattccagtcatactattccttaccaaggaatagtttcaaatgtctgttatgattatcttgtgcatcatttctgtacacatatcaaatgtcatctgattttcaatttgtctttatccttccactagaaatttggaagctttccttttctaaaaagactaatcatatttaggttcagtgttttttctcactaaaatgaacattaccaccaaataacaagatgtaaacaagaaacttcactcagattgggctgaaggaaattgcatgctttccacacagtaatccagagcaaagttcttggaaagaaaaatcaccctgttattaagtagcacttctctaccgaaaacgttcctatcttttgacaggaattccacacttaagaatttaagcctatgaaaatattccagcatacagaaaagcttgaaacgcaaagatgttcatcatagtgttatgtattattgaataaaaattgcaaacattaaatgtccaatattacattatcgtagtatcataaactattataatgtatgtgatagaacttctacagctgtttatactgatgctttccagtgaagaaatacctccagacaggtgcctcatatagtcagcatatataactatgtaaacctaacgaaatgcatgggaaggccagacacagtggctcacacctgtaatcccagctctttgggaggctgaggcaggcggatcacttgaggtcaggagttcaagactagcctggccaacatggtgaaaccctgtctctactaaaaatacaaaaattagctgggcatggtgatgcatgtctgtaatcccagctactcgggaggctgaagcaggagaattacttgaacccaagaggcggaggttgtaatgaacccacatcgtgccactgcactccagcttgggtgacagagcaaggctccagcacaaaaaaaaaaagcatgggaaaagaaaagactagaaggaaatacagcagaacgtgaatgagagctttaagcctagtatgaccataggttaataggttgttttgtttttgtttttccaaaaagctttatagtgaaaaaaatcatacattatgtatatgtatttctaattgcagtaaaatacacacaacataaaatttatcattttcactattaagtgcacagttgagtggctttgagtacattcagattgttgtacaaacataacaatgtccatctacagaatttttcatcttacaaaagatgaaactgaaactgctctgagtgaacaagaattcttattgcttttcccacctcatccccagtccctggcaaccatcattcctctttctgtttctatgagtttgactacctctagatatgttatataggtataaccatataatatatttctttttgtgactggcttattttcacttagcataatattctcagggttcatccatgttgtagaacgtgtcagaatttcttccatttttagggctaatattccgtcgcatgtacatatcacatttgcttatccactcatccgttggacacttgggttgcttctgagttttggctattgtgaatagtgttgctatgaacacgggtgttcaaatatcctttccatacattatattaaaaatattttttttcttaaagttgcaactttttggccagtctaggtggctcaagcctgtaatctcagcaccttgagaggctgaggtgggaggattgcttgagcccaggaatctgagataggctctgcaaaataaaaaataaacctagtcaggcatgatggagtgtgcctgcggttccagccactcaggaggctgaggtgggaggatcacttgggcctggcaggttgaggttgccgtgagccgtgatgatgccactgcacaagtatagcgacaaagcgagactctgtctcaaaaggaaaagaataagaaaattgcaactttctttttagatacagagggtacatgtgcagtttgttgcatgggaatattgcatgatggtgagctgtggggtatggatctcatcacccaggcagtgagcatagtacctgataggcagtttttcaaaccatttcctccttcctccctccccagccccagtagaccctagcgtctgttgttcgcatgtttacatccatctgtgctcagtgtttagctcccacttatgagtgagaacatacagtatttaaatagtttttttctcaaagttgactcctccttttcatgtttcacagtctggttatataactaggactctactcagaacatttggacaaataaagtagtggaggtgggcaaggtgatcaccctggggaaaaaatcacctgggctacacctcagaaaataatgcatctttctgttgttctgattcccattacaggacgaatgccttagtttccactttccagcctggatcccctcacactgaacccttcttcgttgcaccatcctgcttctgacattgaactcattgaactcctcctgacaccctggctctgagaagactgccaaaaaaaaaaaaaaaaaaaaatcaccccagccatttctcttcatcctcactaacaatttggtaatgaagtattgatttccacttctctgcttatgggcggtattagattttcattgataaattgcaatggggctgtctcgtctccacagtacccttttcactgtcacaagaaaacaaagtgccaccgaagaaaagtaatgactgagagcattgatgtacttattttgtcagtttgtaacaggaaagtgggggggagtctaagtcttcatagtctaatgtccaagtgggttgcactagatgtagacacttggaggcttacttttcatggtaatgtccatttcctatttataacccctctgggaacgtttgtctaaaggaaatgtttctgttcagtgtaacaattacagttgcacctggattgcccagtcctgcccctgcactaggggaccattaatcactgcaaagtagaagaattattaagttaaaccagagtttgagccaagaaaacccctgaacaatgttcatcttctgtgaaacttgctcaaatagttaagcttaaccatgttgctgccaaagacttttcctatgcagtggtggggcaccttgatcatcatcattatcttgattggctgaaaaaaaaatagttttaagcacacaccactgtctatgagaactgcaaattgggagaataggtgaaatgcagaatctgagagaacgcgagaagatgagatcattacagggtggaaagttctgcagcagccttttctggtaatccctttctgcagaacctgatgtttatgggctctaaaacgcagcttagctttagaagcaacagaaagcatgaaatagggtgtccattttaaatgtgttcctgcaacttttttcattaaaactttgagggcccaattttaatttgtggaatattcccgttaataatgagatctaattaagacatccattaaaagcccgttaaagttaatttaacgtaaaaattccaatagaactgtattagattttctccattaaattaacgttatggatttttaacggatgtcttaattatacgttattattaacgggaatactgtattacacagattaaaatcaggtcctaagtcaacttggaagagctaagagcatgttttaatattaaaagtcttgcatacctagtgcacagtttggagacgcaaggatagatctgtttactctagttgaacattttctatacaattgaaagcaacctataatagataaatccatcattgcatttaaacaatgaatttccttattctcaaaggacaaatacgtctggattatgtggtaaattgctactcagctatggtgaaatatttatactattctaggcacaacactaggaactaggtgattctgaaacaaaaggaatattttctgttgttgctttaattaccaaggttatttttttttaatctcaacactgacaaaatgaaaccaaatatctcttcctcaccatttctcaaggaggctgcctgttggaattgttttggaaattttgacatgatccctaaattcaacattgggattaaaaaaaaaaaaaaacttcttatttacctcctagggaaagtgttgcccttatgccacatataatagcaaattgctttttttatggcatgcataacctagatgggaaaaaatatggcgcttcggggaaggagggaaaaagtaaatgaagttccaggaatgtcattctgaagtaatgaggcatggacagaaaatatacccctcacatcatcggattgagatggcagtcgaaatagcttcattgaagtgtcagcactcatccatcaatcaatcacccacaaggaaaaatagcaacagtacaacggggtggcttttatgggatttactcatgggcatagggaatagcggctcaaatgtagttctgacatgaaaagcaaggtgctgatattattttttatgatgggaggatcataaagtgaattgagaacagtgaggtctgtctttgcttaacctattcaaccagaaatgaatggagctcgactggaaaggaacagtcttcagatgggttaagattgaagggtggactggactctactgagcaccgtccttcaacaaggaaattctattaaaggaaaatcaatgcattagtattggggttctcgtagctgttaaaaattgtctgctccaatccagggttattaggccaaagttacataattcagatctcactgcaaccatccaaaagtggattctcgagcccttgctccaatggggggaggagatcaatacaattcccaattccatggaaattgtttcccttctaaggaagaaaaaataaatcatctgcttcaacatataatcgatatggttttgttagcgtaatttctatggtgggtggggtgggaggtgagagaaaaaaatattgataaatttggtaagacaggtgaattgccgcctggcaaccgtgcatgtcactgccgagggatggctgctaaggttcaccttagaaaacaagatctgggctggcactggggcatacatcaccactcagcatattcctagaggccaggcctgtcttcactcagccagccctctgaggcttctagaaacttctttctggaggaaaaaaactaaataacataaactcaggagaatgtctttacccaccttcataccactgctttctttttgctgaataaaacacagttctgataagtaagaactttagaattggaaaggaggctgacatgcaaatataatgcaaattaccctcaagtatcgccattcttccaccacctcttggtaccagtgagagcgagagattgccttttcttccccatccctccttccagctaagaccaccaaccagctgcaaattgagatgtccatttaaaaatttatatgtcaatatttaaatgttacatatttggccctattttgtagttcagcaaatcctccaaatacacagcatgttacaaggcactggtggcacagggcacaacaggaaatgatatttatttagcaaattcatttaacaaatattattgggcacctgttatgtgagacactgtcctaggcactgtgggataacaacagcaaacacttcacacaacagcctggccttcctgtgttttacaacagctcctaaagatagctgatatcaagacatttgagggacacagttcatgtagaatcaaaatattagtatttcagaataaggattttttttctgaaaagcatacagagaggaaacagcttaaaaataggtcaagacctaaaaacagaatataatcacggaataaactggataacccagacagtccccacagaatttctttcaggtcacagatttcttaaaactcacccccaaaatgtgcctgcttggttgtttgaatcttgcataattaatgtcacaggcgcaagccgctgaacttagttgagatgcagaaaacaaacaaatgcaatgacatatctgagaagcatttatgtaactccggttaagtggtgaggaggggtgtgtgaagacagtgtgcatgcatgagtgtgtattcatatatatgtgtatacatatgaatttcactgttattttccagggtctatggacaatgtggcagtaagagtctatgatgttctgaaacttttcacagtaaatccaaagattacagaccttacaaggtgcttgcattctgttgcttttccatctgtcacttctcaggttatttgactgtgttcaaaccttcttttctttttcattgagtttcattttttaagcttgttaaatgcttttgtttaaaaaaaaaaaaaaaaccccaaatgtcatttttcacattatcctctcttctctgcaacaaggatagtaagatgtagatgaatgcaaaaataataacaacaataaggaaatatattaaagctttaaaatatgcacatatgtagttctaaagagcaataacggtagtatctatttcgaacatgcattaggcaaaaaagaaatcaaaactgaaattttcgtgtatttttccccttgtaagatgttcaaatgctaacttcattttctcctttcctctatgtggcactttctcaaaatatctatgaaatacttttagacaaagattgagctggagaaagagatacaaatttccatccccccagacagagagacatatttccattgtaggaaggcattaaacattttgaaacttgtgaatcatctttagaatttctactggggaattttacttcttcatccaaagtaaaagccacttatctcctttggttcccagtgacagattcagaggcatacgcagatatacaattttcaggctctagttaatcttcttccaatagttacgaacaatgggctaacaggcgtgggtgtttctccaaaaattattcatgcacaaggcagcccaaagcttcagggaaaactagaaatgtgttatggattagaataggactgttttaaaatgctagtaccaggtggaacgctatttctgcaacaggactctgtccatttcctttggaacaatatattccaagtaaaatggctcttccaaggaatgacacctttacttgacacccttcggcatacaaatgattttaccaatagccatgattattattaaggccttttaaaatacaggctgtttgaaaaaagacagattaaatattcacagcctttgtatcatggttatttgcttaaaacagcttttagaagtacaagtaataactttttgataagaaaccccaggagaaactttttggtaagaaacctcaaaaaatttgaacaaaggcattacaaaaaaaaaaaaaaaactaaccactccattcaactctctcagaaaataaatttcaatgtgttcaatgaattgtcttgaacctgaaacctgcatttagatatcagtcccctgccaatagctaatattaacagaatttgaacaatcatacaattatgtctcaaatgtgaagactttgtacagtaatattttcactttctaaatgacccatataacattcaggaattatagatgtgtatgtatattttttaagtacagaaagttcagccagtcttcagagaagtaaaagtgatgtctattgtgcattgaagtaaatattacaaacattccagtttcgcaatacaatacttgagctttcgaacacctcagacactagaatgtgtaatgcgagtcaaaaaagctgacatacaaaacaattcccatttggctcagggttcctaaatgtcacaatatcttgggtaaaatatactttttgatttcctgatgatgtccttctaatcccttctgactttgattcctaacagccaggcactgttgacatgaatcattaacttccaaacccctttaaaatcaagaagctaggtgatcatacagtcatttcaatggccaaccagttcttgctctacagagcttttacacctttttgggaaacctgatatcaaacacatttatgttatatatttgctcccttgcattaattctagatttttttttaatttcttttagaaagggcaggggggaagtgggtcagagcaaggttcaagaatcacattcatccttgctctaaagtgtttacttgccagcaaagaaaggcaaacacatttttatattcagaaagcagaccggtcattttcaaagaaaaatgactgcaaccatgcctgtagaatgtttctgtgcaagcgcactaattttctatcacctgcatgctgtatataatacatttgcctgtatactaggaagaaaaaccaggctgttttccctgagtacaatgcagcttggatggctgggagcgtaagccttccgtgcatttttatagtgtacatatttgtatatactaactatatcgccatgtatgaacacagattttgttatatttgcttgtttctgtttcctaccaaactggcccacaatggggattcttttgtatagaaaaaatatgcttgtaattttttcctggtcattctctttcaatagcttatgaaagaattagatctgagtttacaaagaaactataagaaccaagtttgtctgtctgcatgagtcccgtccaattgctggatctagggaggaaccaacttcctaattcagagttttccttttaaaggcatgctttacccccatgggaaaactgcacactcatccatgtagaattattctctttgtattttatctaatagtgcctgaaaatttttttaatgtcttcttagaagaagaattcataattgtcaaaatttgaaacattagcttaattttgtttttatgacctcaagattcttctccttatttattcggttgctgttgtaatggggccccaggccattcctgacatcggcgtgttcttcttctgcattaaggatgtttttgaaattacagagattattgagccaacaggctgttttaatcaaaaccatgtttcacttctttttgatgattataaattgtccttgcaatgaaaaaaaaaaaagaacttttctgctaggaagattataccaccctgtggccaaacagattcatcacagataggcatctatgcccatttctctgggatctggaaaattcttcccttggctgaccccaatttcttttactccccattatcctgaatattagctttcaatgcagtcactatttgacatttccaaaggctttgccgcattgtcactgcccaaagacaaacaaccactggaaatgatggctttcctgcttgaaacgaagggggccaggtgcagtggctcaagcctgtaacccctgcactttggaaggctgaggcaggcggatcacttgaggtcaggagtttcagaccaacctggccaacatggcaaaacctcgtctctactaaaaatacaaaaaacattagcagggcatggtggtgcgtgcctgtagtcccagctacttgggaggctgaggcaagagaattgcttgagcccgggaggcgaaggttgcagtgagctgagatggtgccactgcactccagcctgggcaacagagcaagactgtgtctcaaaaaaaaaaaaaagaatggattttcagaaaaagtgctccctttcctgtcctgtggtgccaccatcctgtcctccttcgtaatcatgaacaatctgatcttgaactcccacataacttaaatcaggcaaaaagaaacattcacagcgtccccttgctgaataaaaatgactttgtttggaggcacttaagatgtatgcctgtgtgtggtgccgcagcattgaaattatctgtagaaggggaattttttttaaaaatacaattttatcactagaaataaattccgatggtggaaacgaagaaaacccttaaattatatcacaaaagccattattttttgcatccaaagagtttttttttttaaggaaaatcattctactttgagaactgtaattaaagccctaaataacagacactactttgttgagctattgtgaaaaaaaaacaacacattcgccaaggttatatggagcccctgatttccatcaaaaaggtttctataagtatattatttacatttttatacatgataactcttgcctttgtgttgaaaaaaaaaaagtctcttttttttcccccactcagcagttattggaaatagactgttcccatctgaaaccgtatcgtaatttgcatcaggaaacccaactgctgacattgaggacctgggtgtgttcaattatgattttgctggaggctgtccctcattttaatgctgcagctattgaaccaccttcctgaaacctagctgatacggaatagcagagacatgcctctcaacaccattagctttgcaaatggcttcatttcagtcaacgtcgacttctgctttggccaattgaaaaatgaaaattaaaggagagaagaaaaaaaacacagatgcacttaaaacatgaaaagaattatttatatgataaaaatatatttagcttttcaaagcacaagactgaatagaagtgctctttttatgctttctggagatgttactgttaaatgtctttctacatcaggcttaataaatctgtaatgacatttgatggattgatttctgcctatgtgtgttttttaaagatggcaagagaggaaaaaggcaagagaggggggatgagggcgggaaagaacagcaccgacccccggggaggctaagcgaggacgttattggtaggcctctctgtggttgggacccgctgacccacttccagaatctcccctcatctccatcagatttccttttttttttttttttttttttaacaaatgccagcaccccttgtttggtttctgggctgcctctgactgctcttatctctggtctgcttatgcctgagtaatttatgatgtaatctcaacagaggcagtgggcggctgtgtcacaaattcaaggaagcaaggcagagagcagccgtgattgagatggcccgaccttctccacctcaaagcgatggccctgcttaccactcagtttccctgtgtactcccctccacttcctttaacgtcctgggagaattggaccatgtttcatatacaagctgcccaagcagacgctgatgccccaccaaaaatgatttgttgtctgtgcacagctagctctcggctcctgtgtcttgtggttgcatgagccccatactcattaaattatgatggctaccgtatcacctgttagctctacatcattgccatggctccatgtctaggacataaaataggagcagccaggctagagagagcaagtcagctgaggaatgagggaggtagccatggcgaagtattgggataagcaccttggacccagtcaaagagttcttggtcatcatttacttagtgaacactgactgagcacctactatgtgtcaggtctgaggatgacacagataaatgaaggcagtgatggttatgagaacaggattgagagccaaactgtgttaaggtccaggtcctgtcatgttttatctgtgtgatctaaggcaagatcacagaaagaaaagaacacaaagctgccaggcgtggtggctcacacctgtagttccagcactttgggaggccgaggcgggcagatcacgaggtcaggagatcgagaccatcctggctagcatggtgaaactccgtctctactaaaaatacaaaaaattagctgggcgtggtggtgggcgcctgtggtcccagctactgaggaggctgaggcaggaggatggcatgaacccgggaggcggagcttgcagtgagcagagatagcgccactgcactccagcctggatgacagagtgagactctgtctcaaaaagaaaagaacacaaagcaaggatgataatgagggctgtggaagctcagaggtggcccccagccaacctgagaagtcacagaaggatgaaggcaaaacctgtgccatcactgaagtaatttctcaaaggggtgtggaaaaaccaccaggacacgagagtgtgtgccttaactacccccttcttccaatctagtccgtcaacaactcctgtggtttctaacttcaaaatacatgaatctgtttactttaggtctctcctagacatctgggatggccgcccaactaatctcccatctgtcatcttaagccctctaaacccaaatccatgctccacatggtagctgaagtgatgctttaataaagtaaatcaaatcatgttattttgctcttcaagaccgagggtcagcacactttttgacggctcagatagtaaatatattcatctttgtagaacatctagtctctgacccagcaactcaactctgccattgttgtgcaaaagcagctatgagcaataataagtaaatgagtgtagctatgttccaataaaactttactccataaaaacaagtagcaggccaaatttggcccacagaccatagtttgccaaccctggctcaaggtccttcaacacccaggtttccatttatcttagattgatttctcatggaaacaggccctgagatgaggatgcgaggtcaggacaagtagttcatataggaggtgaatccaggaaacactaagagaggaatggggagggaaacaggaaaggaagaatgcccaaaaaagaggccttaagaacaattatcgccatgggcaatggagtccaattccactggggagctctggaagacaacgtgcagcatgcctcagtaatcctgcctgaggggtgagggagctggggtatttatacaccacctctgctcagttattagtcaaaggctactgcagggtaaggtagggggacatcaattccctagcacttccatctgcccaaaggttggaagaaatagtcttcagtggccagagaacacctcaaggcacagagttccagctgcttgaaactggaagtaaagatgaacgacatgcaaagaaatagtctatgccaaggaatgggggcagggcttctgcagcaccccgtctcacatagagagaaatccaaactcctccccaggcagtattttttttttttttttttttttggaaacagaatctcgctctctcacccaggctggagtgcagtggcgcgatcttggctcactgcaatctctgcctcccaggttcaagcaattctcctgtctcagcctctcaagtagctaggattacaggtgcccaccaccatgcccggctaatttttgtatttttagtagagacgggatttcaccatgttggccaggctggtctcaaactcctgacctcaggtgatccacctgcctcgtcctcccaaagtactgtgattacaggcgtgagccaccacacccggccccccaggcagtattgaaccttcctggtttgtcccctgcctgctttcctgacctcatctctcctctagacacgcagctctagccatgctgccctgcaacagttcctaaaccacacaacactgttccctctagtgacagtgtgaaccacctagccaggcttcttcctatttcccatgtctctgccttgggaatctcctcttctgaaaggtgctctcttagccctcatctacagtgccctgttactatacccctcagccccgatcacgagtttgttgtcatttatgtgtgatcaatttccttcacaggccaccatgtgaaaacagaaaccaatgtctgtttttttcatgtattcctataagaagcataatgcctgacatacaatacgtgtccaacaaataattgttaaataaatgaacgctgttcttctgaaggcctgggaggtctccaggcacagtctctaaaattctccctccctccccctgcccgaccactgccaggagtcaccgctttcatcctccccctagtgcagggaagcatttctcaaggattttatacaatcacagaacatgctattgaaatatctgaactttctgggtagccaggggcctcagtgagctccaactaggttacagagcatagtctcaggaagccgcaaggaaaggaggaccccaggagcatgagaccctgcacccagtgccaggtccccactgagagccaaagagcgtgtgtgtttgccctaaaaccagtggactcaaggcagtcccttaaaaagttcaagcacaggccaagtgcagtggttcatgcctgtaattccaacactttaagaggccaaggcgggcagatcatctgaagtcaggagttcgaaaccagcctggccaacatggcaaaaccccatctctactaaaatacaaaaattagccgggtgtggtggcgggcacctgtaatcctagctactcaggaggctgaggcaggagaattgcttgaacctgggaggaggaggttgcagtgagctgagactgggccactgcactccagcctgggcaacagagcaagactctgtctaaacaaagaaaaaagtgggggtggggggagcgagagcggtggctcacgcctgtaatcacagcactttgggaggccaaggcaggcggatcatgaggtcaggaaatcgagaccatcctggccaacacggtgaaaccccttctctactaaaaatacaaaaaattagccaggcgtggtggcatatgcctttacttccagctactcgggaggctgaggcaggagaatcccttgaacccaggaggtggagattgcagtgagccgagatcatgccactgcactccagcctgggcgacagagcaagactctgtctcaaaaaaaaaaaaaaaaaataataataataataataataataataaaaggctgggcacagtggctgacgcctggaatcccagcacttcaggaggccgacgttgggggaacacttgaggtcaggagttcaagaccagcctggccaacgtggcaaaaccccaactctactaaaaatacaaagatttgctgggtgtggtcacgtgagcctataatcccagctacttgggaggctgaggcacgagaatcacttgaatctgaaaggctgagtttgcagtgaaccgagattgtgccactgcactccagcctgggtgacagagtaagactctgtctcaaataataatactaataataataacaaaaaaataaaataaaatagtactcacacaactgataagcttaccagaaactgaagttaagtatttgttttatgctataaattaaagcatattccagatgaactaaaggattatatccagaaaacaaatcataaaacaattagaataaaatctatgttgatagctgatatgagtcagggaagtcattccaaccttaaaagtcttaagttccggtcttaaattatttcttccttaaatggtaagaaagaaataaaaagaagaaataataaaaactccaggagtcaaaacacacacacacacacacacacaaatactgtaaatacagtgaaaagtcactgggggaaaattatttatattgatacatgattaatggtgacagttctaattaattatatgaagagtgttttatatatatgtgtatatatatatatatacacacatatatacacatatatacatatatatgtgtatatatgtatatatgtatgtgtatatatatatgtgtatatatatgtatgtgtatatatatatgtgtatatatatgtatgtgtatatatatgtgtgtatatatatatatgtgtatatatacatatatatatatgaaaaataagtaaatatccaaatagaaaacttttggcaaaatgtataagccaacattaaaaaattgataaattaaaatggttaataaacatttaagacaagtgacaataataatcaaagggatgtagaataagtaaaataagaagaaatcattttcacttatcaaactgacaaaaataaagaaaaatgttcccattgttggagagggctcaaaaagagatatacacacacatcgttgctgaaagcaaaaatggatagcaactttctggaaaataattaaacagtatttatcaatttctctaaaatgtgtatgccctttgattaattactattctggagaactttccttgaaaataattgaagatgtgcactgagatttatttaataagaatgtttgatcataacattggttataagagtgaaaaactggaataaacctaagtgttctaaaataggctgattaaataaatgatggtacatctatgccttagaatagtacacagtcatgaatacttgagcacttaaaaatagtcacagtatatttattaaaaaacaaaatagaaaaaaatgaagatagacaaagaatatagaccaatgttattggtgttgaacttctgaataatgtttaattttatgttctttggtatgtttttactttttcttaacttacaaaatatttcttttttcttttttttttttttatcatttttttgagacggagtctcattgtgtcgcccaggctggagtgcagtggcacgatctcagctcactgtaacctcctcctcccgagttcaagcaattctcctgcctcagcctcctaagtagctaggactacaggcacccgccaccacgcccggctaattatttgtatttttagtagaaacggggttttgccacgttggccaggctggtctcaaactcctggcctcaggtgatccgcctgccttgacctcccaaagtgctgggattacaggggtgagccaccacactaggcccaaaatatttcattataagcatatattacctgcataaaaatatatatatattaggagtgtcatgagctgagatggcaccactgcactctagcctgggcgacagagagactccatctcaaaaaaaaaaaaaaaaaaaaaaaaaaaaaaaaaaaaaaaaaaatatatatatatatatatatatatatatataatatgtgtgtttgtatatatgtatacatatatgtagatatatatatgtgtatatatatgtatatatacccatacatatatgtatgtatattttaaaaaggcaacaaaaaacaccacaatgagtaggaagcctcttcatgtttcttttcttctactttttttttttttttttttttgaggcggagtctagctctgttaccaggttggagtgcagtggtacaatctcagctcactgcaacctccaactgcctggttcatgcgattctcctgcctcagcctaccaagtagctgggattacagacacacaccaccatgcatggctaattttcgtatttttaatagagatgggtttcaccatgttggccaggatggtctcgatctcctgatcttatgatccgccctcctcggcctcccaaagtgctgggattacaggggtgagccactgcgccctgcctcttctacattttttgtattgtttatttttttatttattcattcattcattcattcattcgtttatttatttttgagacggagtctagctctgttgcccaggctggagtgcagtggtgtgacctcagcttaccacaacctctgcctgccaagttcaagtgattctcctgccacagcctcctgagtagctgggattacaggcacgcacccccatgctcggctaatttttgtatttttagtagagacgggatttcactatgttgggcaggctggtcttgaactcctgacctcgtgatctgcccgccttggcctcccatagtgctgggattacaggtgggagccaccacgcctggcctctttatattttttatactgagcttatgtttatcttggcgtgaggtgttttttctaatttttccaggaacatatcaatatagtatgaccacaacatgtgaaagaaactaaaaaagtggtaaaaatgcattaaaattaagtggccactatagcagttttctgccccagaggagtagagaaaaggtctcagggcacagctgagcaattgcccctaaattagctgaagtccctctaggaccttgtcttccagcacttattacagttgtaattttatcctgcttggcatgatcatcattaatgaatgcctaccttcctcacttacactaaaattaacagcttagcattataatggtacacaccacatgccaatcgtttttctaagcactctgcctatattatttcctttaatccaaacaaacaaccctctgaggtgagtacagttttctcctccatatgacagatgaggaaactgaggaacagagagggcaaataagttgttcaatctccacaggctagtaagtggcagagttgggattcagccaggccaactggctccattgtttgtggtcttggccaattctctaccaggcgtcagcagattgcaacccatgggccaagcccagcccccaccatctgttttgtttttcaataaagttttattgaaacacagccatgctcatttgattacttatctatggctgcttgcactttacaacagccaagtgaagcatttgctacggaaacttacatggatctctcctcgctccacaccgctgcatggcaccctctgggttacagtgatgccatcataatacaatttcattttttgttccccaaggccaaaaatatctactatctagtcgtttaccaaaaatctttgacgagccccattactctgtcactagatttcagactcatgaagacaggagcaaaatcctgcttggtctcccactgtttcaccagctcctgcaacagagtctatcagccctcacactgcacagttgcttaaaaaaaataaaattatgtatacatagaaaagaatcaggccgggcatggtggctcatgcctgtaacctgagtactttgggacgccaaggcaggcagatcacttgaacccaggagtttgggaccagcctggacaacatgatgaaactccatctctacagaaaatttaaaaaattatccaagtgtggtggtatgtgcctgcagtcacagctactcgggagggtgaggcaggagaatcatctgagtcccagagttcaaggctgcagtgagccatgattgtgccactgcacttcagtctgggcgacagagcaagaccctgtctcaaaaaaggaaggaagagagggaggaagggagggaggaaggaagggaggaagggagggaggaagggagggaggaaagaaaggagggagaaagggaggaaaggagggagggaggaagggagacagggaggaaggagggaggaaggaaggatcaacagatacgtggaggagccaagatggccgaataggaacagctccggtctacagctcccagcgtgagcgacacagaagacgggtgatttctgcatttccatctgaggtaccgggttcatctcactagggagtgccagacagtgggtgcgggtcagtgggtgtgcgcaccgtgcgtgagccgaagcagggcgaggcattgcctcacttgggaagcgcaaggggtcagggagttccctttctgagtcaaagaaaggggtgacggactcacctggaaaatcgggtcactcccacccgaatattgcgcttttcggacgggcttaaaaaacggcgcaccacgagattatatccggcacctggctcggagggtcctacgcccacggagtctcgctgattgctagcacagcagtctgagatcaaactgcaaggcggcagtgaggctggcggaggggcgcccgccattgcccaggcttgcttaggtaaacaaagcagccgggaagctccaactgggcccagcccaccacagctcaaggagtcctgcctgcctctgtaggctccacctctgggggcagggcacagacaaacaaaaagacagcagtaacctctgcagacttaaatgtccctgtctgacagctttgaagagagcagtggttctcccagcacgcagctggagatctgagaacgggcagactgcctcctcaagtgggtccctgacccctgacccccgagcagcctaactgggaggcaccccccagcaggggcacactgacacctcacacggcagggtattccaacagacctgcagctgagggtcctgtctgttagaaggaaaactaacaaacagaatggacatccacaccaaaaacccatctgtacatcaccatcatcaaagaccaaaagtagataaaaccacaaagatggggaaaaaacagaacagaaaaactggaaactctaaaacgcagagcgcctctcctcctccaaaggaacgcagttcctcaccagcaacggaacaaagctggatggagaatgactttgatcagctgagagaagaaggcttcagacgatcaaattactctgagctacgggaggacattcaaaccaaaggcaaagaagttgaaaactttgaaaaaaatttagaagaatgtataactagaataaccaatacagagaagtgcttaaaggagctgatggagctgaaaaccaaggctcgagaactacatgaagaatgcagaagcctcaggagccgatgcaatcaactggaagaaagggtatcagcgatggaagatgaaataaatgaaatgaagcgagaagggaagtttagagaaaaaagaataaaaagaaatgagcaaagcctccaagaaatatgggactatgtgaaaagaccaaatctacgtctgattggtatacctgaaagtgatggggagaatggaaccaagttggaaaacactctgcaggatattatccaggagaacttccccaatctagcaaggcaggccaacgttcagattcaggaaatacagagaatgccacaaagatactcctcgagaagagcaactccaagacacataattgtcagattcaccagagttgaaatgaaggaaaaaatgttaagggcagccagagagaaaggttgggttaccctcaaagggaaacccatcagactaacagcggatctctcagcagaaaccctacaagccagaagagagtgggggccaatattcaacattcttaaagaaaagaattttcaacccagaatttcatatccagccaaactaagcttcataagtgaaggagaaataaaatactttacagacaagcaaatgctgagagattttgtcaccaccaggcctgccctaaaagagctcctgaaggaagcgctaaacatggaaaggaacaaccggtaccagccgctgcaaaatcatgccaaaatatacagaccatcgagactaggaagaaactgcatcaactaacgagcaaaatcaccagctaacatcataattacaggatcaaattcacacacaacaatattaaccttaaatgtaaatggactaaatgctccaattaaaagacacagactggcaaattggataaagagtcaagacccatcagtgtgctgtattcaggaaacccatctcacgtgcagagacacacataggctcaaaataaagggatggaggaagatctaccaagcaaatggaaaacaaaaaaaggcaggggttgcaatcctagtctcagataaaacagactttaaaccaacaaagatcaaaagagacaaagaaggccattacataatggtaaagggatcaattcaacaagaagagctaactatcctaaatatatatgcacccaatacaggagcacccagattcataaagcaagtcctgagtgacctacaaagagacttagactcccacacattaataatgggagactttaacaccccactgtcaacattagacagatcaacgagacagaaagtcaacaaggatacccaggaattgaactcagctctgcaccaagcggacctaatagacatctacagaaccctccaccccaaatcaacagaatatacatttttttcagcaccacaccacacctattccaaaattgaccacatacttggaagtaaagctctcctcagcaaatgtaaaagaacagagattataacaaactatctctcagaccacagtgcaatcaaactagaactcaggattaagaatctctctcaaaaccgctcaactacatggaaactgaacaacctgctcctgaatgactactggatacataacgaaatgaaggcagaaataaagatgttctttgaaaccaatgagaacaaagacacaacataccagaatctctgggactcattcaaagcagtgtgtagagggaaatttatagcactaaatgcccacaagagaaagcaggaaagatccaaaattgacaccctaacatcacaattaaaagaactagaaaagcaagagcaaacacattcaaaagctagcagaaggcaagaaataactaaaatcagagcagaactgaaggaaatagagacacaaaaaacccttcaaaaaattaatgaatccaggagctggttttttgaaaggatcaacaaaattgatagaccgctaacaagactaataaagaaaaaaagagagaagaatcaaatagacgcaataaaaaatgataaaggggatatcaccaccgatcccacagaaatacaaactaccatcagagaatactacaaacacctctatgcaaataaactagaaaatctagaagaactggataaattcctcgacacatacactctcccaagactaaaccaggaagaagttgaatttctgaatagaccaataacaggagctgaaattgtggcaataatcaatagtttaccaaccaaaaagagtccaggaccagatggattcacagccaaattctaccagaggtacaaggaggaactggtaccattccttctgaaactattccaatcaatagaaaaagagggaatcctccctaactcattttatgaggccagaatcattctgataccaaagacaggcagagacacaaccaaaaaagagaattttagaccaatatccttgatgaacattgatgcaaaaatcctcaataaaattctggcaaaacaaatccagcagcacatcaaaaagtttatccaccatgatcaagtgggcttcatccctgggatgcaagtctggttcaatatatgcaaatcaataaatgtaatccagcatataaacagagccaaagacaaaaaccacatgattatctcaatagatgcagaaaaagcctttgacaaaattcaacaacccttcatgctaaaaactctcaataaattaggtattgatgggacgtatttcaaaataataagagctatctatgacaaacccacagccaatatcatactgaatgggcaaaaactggaagcattccctttgaaaactggcacaagacagggatgccctctctcaccactcctattcaacatagtgttggaagttctggccagggcaattaggcaggagaaggaaataaagggtattcaattaggaaaagaggaagtcaaactgtccctgtttgcagatgacatgattgtatatctggaaaaccccactgtctcagcccaaaatctccttaagctgataagcaacttcagcaaagtctcaggatacaaaatcaatgttcaaaaatcacaagcgttcttatacaccaacaacagacaaacagagagccaaatcatgagtgaactcccattcacaattgcttcaaagagaataaaatacctaggaatccaacttacaagggatgttaaagacctcttcaaggagaactacaaaccgctgctcaaggaaataaaagaggatacaaacaaatggaagaacattccatgctcatgggtaggaggaatcaatatcgtgaaaatggccatactgcccaaggtaatttacagattcaatgtcatccccatcaagctaccaatgcctttcttcacagaattggaaaaaactactttaaagttcatatggaaccaaaaaagagcccgcatcgccaaggcaatcctaagccaaaagaacaaagctggaggcatcacactacctgacttcaaactatactacaaggctacagtaaccaaaacagcatggtactggtaccaaaacagagatatagatcaatggaacagaacagagccctcagaaataatgccgcatatctacaactatctgatctttgacaaacctgagaaaaacaagcaatggggaaaggattccctgtttaataaatggtgctgggaaaactggctagccatatgtagaaagctgaaactggatcccttccttacaccttatacaaaaatcaattcaagatggattaaagacttaaacgttagacctaaaaccataaaaaccctagaagaaaacctaggcattaccattcaggacataggcatgagcaaggacttcatgtccaaaacaccaaaagcaatggcaacaaaagacaaaattgacaaatgggatctaatcaaactaaagagcttctgcacagcaaaagaaactaccatcagagtgaacaggcaacctacaaaatgggagaaaattttcgcaacctactcatctgacaaagggctcatatccagaatctacaatgaactcaaatttacaagaaaaaaacaaacaaccccatcaaaaagtgggtgaaggacatgaacagacacttctcaaaagaagacatttatgcagccaaaaaacacatgaaaaaatgctcatcatcactggccatcagagaaatgcaaatcaaaaccacaatgagataccatctcacaccagttagaatggcaatcattaaaaagtcaggaaacaacaggtgctggagaggatgtggagaaataggaacacttttacactgttggtgggactgtaaactagttcaaccattgtggaagtcagtgtggcgattcctcagggatctagaactagaaataccatttgacccagccatcccattactgggtatatacccaaaggactataaatcatgctgctataaagacacatgcacacgtatgttgattacggcattattcacaatagcaaagacttggaaccaacccaaatgtccaacaatgatagactggattaagaaaatgtggcacatatacaccatagaatactatgcagccataaaaaatgatgagttcatgtcctttgtagggacatggatgaaattggaaatcatcattctcagtaaactatcacaagaacaaaaaaccaaacaccgcatattctcactcataggtgggaattgaacaatgagatcacatggacacaggaaggggaatatcacactctggggactgtggtggggtggggggagcggggagggatagcattgggagatatacctaatgctagatgacgagttagtgggtgcagcgcaccagcatggcacatgtatacatatgtaactaacctgcacgacgtgcacatgtaccctaaaacttaaagtataataaaaaaaaaaacagatacataaatgagtcttagctaataccttcatatgtgctgtgtagtgacgcttgcctagtaagacatcatgctgagaaatggactgattctcacagcagcccgcagggtactagtcaccccccatttcacagatgagaagattcgcattgctcagtatcacacaccacttgacatgtagacctgaaattcagacttaacgtttgtggtgtgggaaagtccacactcttgtgagcccctagcatgagtcttgggaaatggtgggccctttaaaaatgatagtttcttcactatgtgcaaactttagggacctaaggcccatgctattaccaagaggtgttgcaggacttctaagaagacccggtgaggcctggaggctgcaggatgaataatggaggacaggcacttcccggagaaagtgaacatgacaagcaaagacctttgaaatatgagctggtgtctcacttccccctctaggtcttccagcccctccttggtctgcttcccaggctccagaactaagctcctcctgtctcgagggaaaccgaacggctttgggaaaacacacgatgttctcagaagtaagggcaagcttcctgcgcccccagcctgtcctgcctgcgctcatcctggattgattacttttatcgtccccctgtggccccagatatgctccaaaggactcagcaggcctgagactctgtctggtctggctcctgccattccagcacattctacactccagccaaactggagtcctctggatcccagcacctgccaccgtacctttgcatgtgctgggaccctggtcttcccactgtccctcacccttcagcttcccctaaggactgcctctgactctcggcttagaaaaagtcccctgccctccagtcccaccctggacctccctcttgcaaaggtcctggcagttgcagtcacatgagctgttgcaaagatcctggcagttgcagtcacatgagctgttgcaaaggtcctggcagttgcggtcatgtgagctgtctgcttgtctcccacatgcactaggggcagggctccagcagccttccccctcatgccccagcctgcgtccccagcaccacaccctgtggctaagacacagtgggagcgcaaagaagtcacgttggcgtggtgcacatgacaaaggccgggtgatagtctcgctccaagcagcctcaggtatgctcctgtgatggttaagtgtcagcttgattggactgaaggatgcaaagtattgtttctgagtgtaccttggtgtgtctgggtgttgccagaagacattatcatttgagtcagtggactgggagaggaagacccacccccaggaagatgcacctacagtgtaggtgggcaccatccaatcagctgccagtgcagctagaaaaagcaggcagaagaaggtgggataagctggctggctgagtcttccagccttcatccttctcctgtgctggattcttcctgcccttaaacaccagactccaggttcttcagcctttggactcttggacttacaccagtggtttgccagggaatctcaggccttcggccacagactgaaggctgcactgtcggcttccctacttttgaggttttggggcttggactgagccactactggcttccttgtcctcaacttgcagacggcctattgtgggacttttaccttatgatcatgtgagtcagttctccttaataaactcccttccatatatacatatatccagccgggcacgatggctcatgtctgtaatcccagcactttgggaggccgaggcaggcggatcacttgaggtcaggagttcaagaccagcctgaccaacatggtgaaacctcgtttctgctaaaaatacaaaaagcagccaggcctggtggtctgcacgcctgtaattccagctactcgggaggctaaaacaggagaactgcttgaacccaggaggtgaaggttgcagtgagccaagatagcaccactgcactctagcttgggcaacagagtgagactctgtctcaaaaaaaataaaaacaaaaataaataaaaatacaaaaattagccaggcgtggtggcaggcacctgtagtcccagttactcagaaggcggaggcaggagaattgcttgaacctgggaggtggaggttgcagtgagctgagattataccactacactccagcctgggtgacattccagagtgatactccgtcttaaaaaaacaaaacaaacaaacaaacaaaatatatatatatacatatgtcctataaattctgtccctctggagggccctcactgcattatagaggaaaacgtgcatcatgcacggcagagatgaagacacagaggcccaggtgggagagcttacagctgtgcagagccatggagcaaacggagacccgagccgaacctcagatcctgaactgcgctgtgacagcacaggatcccctcagccacaagacagtgcctccttctactcttttgctctcccattcatactcaatatgtgggtattagactgggaaagaagatcacgtgtgttaatgtacgatcagtaacataccttatataatacacattaatatattattgagcactgactctgcattaggttcttggcacaaataatctgttttaattcttttacaatttccttaaaacacacatgctcaacaaggtgatatcccccccaaatgggcaaaaattaattattggggaatgaaaagccttagcgattgccatggtctgtggccttccaaagggccacagaacataaacaatatagtaagtatctctgatattaaaatgtcattggtcatggggtcaggcacggcagctcaagcctgtaatcccaacactttgggaggctgaagggggaggatcacttgaggccaagagttcaagatcagcctgggcaacaaagggagacccctatgtctaaaaaaaaaaaaaaaaagaaagaaagaaacaattaaaaggcatagaatgtaggtctgttttaaaaaaaaaaaattcatggggaggggacaagtaggaacaaaatgtcttaaaacactcctcaagggagcaattaaaaataaaaaggcaattttaaaaaaaggctcacacctataatcccagcaatttgggaggccaaggtgggagggttgcttaagcccaggagttcgagaccagcctgggcaacgtaggtagaccccccccaatctctacaaaaaaaaaaaaaaaatctgttaaattagtcgaacacggtggcatgtgcctgtggtgggaagctactacttgggaggctgagatgggaggatcacttgagctcaggaggtcaaggcttcagtgagccatgatcacaccactgctctccagcctgggcaacagagtgagaccctgtcttgaaaaatatgaataatttttaaaataaaaggttgagtaacaccatcctaaaatgtaggtgttctcatgaattccgtggtacaggctcagagaggcaagctaatttccccaaagtcacacagcaagtaatgtgaattcttgtgtagagaaagaattcaaacccacatctatctaaagccaaaagccacaccctaaatgacgtctgaatcatctgcagacattaagtcagcaacagtagtaagaatgtcctccagatctcgccctcaaaccagcaggaacggtggcttctgatagcttggtagaaatgcaaactcaggccctgccccagacctactgaatgtgaatccgcaaggcgccctcatgactgtgcacaggcctttgctaagggagctgggattcccacggccacagctgagcaaccctcatcttccctgaacagcagagacaaagacgcctacgactgttcccacatccgaggtccccagccccaatcagaaactcccttgtcagactaattatacttatgggtgttccgtgacttgctgtattcccagaaaaagaaagaaaaatgaagttctctttcaggttttcagggtagataatgtcaaatatttacagagcaaacatcattctagaggcgcgccattctctttctgctgattagagcactgccaatcacgccttgatgagagggcctgtcagccttctcaacagcaaccccgtcatctcgactgaactgggcatgcctgctgtgctggggaatgcagggagaggttctgaaggcaggcctttggaaggagggggctccagggttgccaaagactcacctctgtggagtaggacgggcttgaagctggctgttcaatgaagatgctggaggaagacagaagagaggcctttggtggcctctctcgtaaaccagagcttctcagactcgagctagcatcagaaccacctgcagggcatgatacagtgactggccctgctcccaggatgcaataggtttagaatggggcctgatgatttgccggtctgcaaagctcccaggtgatgccactgctctgagcaccacactttgagaaccaggtccgaacctttgctagtccaggtgtgagcctctgagcagtacattcagtgttacccaggagcttgttagaatgcagaatcttgagaggtgattaatgagtacaaatataaagttagaacaaataatcttctcgtgttcaatagatcagtagggcgactatagttagcaataatctattgtacatttccatctagctagaagagaataatttaaatattcatagcataaagaaagaacttttttttgagatagggtttactctgtcacccagggtggagtgcagtaatgcaatcatagctcactgcagcctcaatcccctaggttcaagcgatccctccacctcagcctcctgaatagctgaaatgacaagtgtgtactaccacacatggctaattttttaaatacagactgggtctcactatgtggcctaggctggtctcaagcaatcttccctcacaaagggaagcctcaacctcccaaagtactggggttataggcgtgagccactgtgaccagccaagaaaagataaatatttaaggtgatagatatcccaattatactaatttgatctttacatattatataaatgttagcagaatatcacaggtaccctgaaaatatttacatttattttatatcaataaaatcttttaattaaaaaaaaagaaatgcagaatcttggaacctactctagctactgaacagaatctgcattttaacaagatctatgagtaataactgtgcacattaaactttgagaaggcctggtctgtccataattacacatcagaatcagctggagcagctgttaaatgcagattcctgggccccaccctggatttaaataatcagaatatttgaggagcaggaccagggaaatagtatgtttaaggaagtgcgcaggtgaaggctcataaagtcagtggtattggtctaaagagtggtctctaaactaccaaggtgatgtgcacacacctgtaacccccaatggatctttatttagcgatgcaaaaataatatatacatcttattatatgaatttattgtgcatattataaaacatattcaaaaacacaatgcagccaggtgcattggctcacgcctgtaatcccaacaccttgcgaggccaaggcaggcagatcacacgaggccaggagttcaagaccagcctggccaacatggtgaaaccccttctcttctaaaaatacaaaaatgtgcctaggtaagaaaaggaatgaattgtaagccttgaatcctagcgttgtaaagcaaatgtccacctgctccaaacagatggataaatggatggatttaaatctctatgtgacgtgcccgccagtcctaatcccattcctcttcacaagaacttttaatattaaggtcacgatagcatcaagcttctatttaaattacatttcttggtttttgtctacttaaagcagagtaaaagcagtaggggtgtgtgtatgtgtgtgtgtgtgtgtcctggttatctcacatttatttgctttcttaggtattctgacattaacccaggcctgctaggggacattagtaaatatttggtcgtaaagtatcttcaaagaacaattttctgagttaaccacacccgataaaatcctctcgcatcactgaaaggcttgtctggctgtcaggcagtgagatcgttttattgaaaagactcatgatgtagtgaacaaaagcttaggaaataaactctaatccccaaaggaacactcaatacaactctactcacactaaaatattcaatttatggcctatattgaatcctatgtctataatttactgccctaactacaaaggagtttttttaatacaaaccaatttcaatatattttactattttccttgcctctgttaaagcagaaataacaaattttgctgaaagcttaggagataaatgcaatagcaatttccaggggtgcctcttacaatcatctagttttcatcagactttaactgagtgcctaggattgtgtcaggtgccccgggcattgctttttttttttttttgagacagagtctcgctctgttgcccagctgtgcagtggcacaatcttggctcactgcaacctctgcttcctgggttcaagcaattcttctgcctcagcctcccaagtagctgggattacaggtgtgtgccaccacacccggctaatttttgtattttggtagaaacggggtttcaccacattagccaggctggtctcaaactcctggcctcaattgatcggcccacctcagcctcccaaagtgctaggatttcaggtgtgagccaccttgcccagcccatattgcttttttttttttttttttttttttttgagacatactctcgctctgtcaccaggtgggagcacaatggcacgatcttggctcactgcaacctccacctctcaggttcaagcgattctcctgccacagcctccccagtagctgggattacaggcatgcgccaccatgcccagctaatttttgtatttttagtatagacagggtttcaccatgttggccaggttggctctatttcttgaccccgtgatctgcccacctcagccgcccaaagtgctgagattacaggcatgagccaccctgcccggccccatatttttttagctagcttcccaggtccttctgatatgtacccaagcaccatagccctcaggaaaacaaaaatatgtttattcagtaaacatatatagggtacctgccatgtgccaagagtcattctaggtgctgtggacacaacagtaaaaaaactagacaacagagtccttctgtttaaagggctgtcgttctagagaaaagagagaaaataaataaatcagtaaaatatacgctatacagcaggggtccccaaacccccggccacggacgggtactgaccaggactggactggacagcaggaggtgaatggcgagcgagtgagccaagcttcatctgtgtttacagccgctccccttcactcacgtgactgcctgagctccgtatcctgtcagaccatcagcagcattaggttctccgaggagcctgagccctgtagtgaactgcaagtgttgagggatctgcattgtccttatgagaatcaaatgcctgacgatctgtcactgtctcccatcaccctcagatgggaccgtccagttgcaggaaaacaagctcagggctcccactgattctacattgtggtgagttgtataattacttcattatatattacaatgtcataatcataaaagtgcacaataaatggaatgtgcttgaatcatcctggaaccaccacctctccccgccacccccgggtctgtgaaaaaattgtcttccactccaacctgggtgacaaagccataggggaaaaaaaaaaaaaacctgaagacgttaaaaaaacaacaacaaaaaacacacacacaaataaaatgtctgctgtgggggccgttttttttttttttttgacagggtctcaccctgtcacccaggctgggatgcagtggtgcaacctcagctcactgaaacctctgacccccgggctcaagcgattctcctgcctccgcctcccaaaaataggtgggaaacaataaaaaagaaaagaaaaacaaaaaagagagagagaaaaataggtgggaaacaaagaggagaaacgcaaaattctacattcagaatgatctagagtatgtaaaaagtatgttcatttcaaaagagcaaaaataaaaacaaaacaaaacaaaaaactggaagtaagacaatgacaatgatcctggccttggaatgctgggaccctgagaaataataagaccacttctctctacattcagacttttttccaaaaataaaatatatgtataaaatatggctgggtgcggtggctcatgcctgtaatgccagcactttgggaggccaaggcaggtggatcactaggtcaggagttcgagaccaacctggccaacaaggtgaaaccccgtctctactaaaaatacaaaaattagccaggtgtggtggcgagcccctgtaatcccagctactcaggaggctgaggcaggagaatcacttgaacccaggaggcagatgttgcagtgagccgagatcgtgccattgcactccagcctgggggataagagcaagactccatctcaaaaaaaaaataaaaaataaaaaataaaataaaaataaaataaaaaatatatatatatatataatgtttctgattggacttaggctccagaaacaactaaatagaaaaatatacattatcttccttcataagaaaatttacagatgatatttctgtgaacatgagattaaatcctatggcctattattatgacattttaaaatttatgttctgcctcatttcacaaaagacttaaagcagaaatttggacatattttatggaaataactatttagctgagactacgccccattgctgtaatattcaagatgagttttttttttaaattatatattcagaggaagaagtcccaggcattctaaagaagagacattattagatcagaggacggcaaatgttttctgtaaaaggccagagagtccgtgttttcggctttgcaggttatacggtccattccaccattaactcactctgcccttgcaccaggaaagcagccacagaccacatgcaaaccaacaagagtggctgtgttagcagaaaactgtatttatggacactgaattttgaatcttaggtaattttcatgtcatgaactattactcttaatttttttttttgcgacagtcttgctctgttgcccaagatgaagtgaagtggcataatctcagctcactgctacagcctccacctcccagtttcaagcgattctcctgcctcagcctcccaagtagctgtgactacaggtgcccaccaccacactcggctaatttttgtattttttgtagagatggggtttcaccatgttggccaggctggtctcgaactcctgaactcaagcaattggcctgccttggcctcccaaagtgctgggattacaggtgtgcaccaccgtgcccagccccctacagacattttaagtagagcaatgcctactgacccctttaaaatatgtctgcaggttggtttgtaaaactcttctctgtttgtccttaaaaaatggccaataaagtcctcagtaccttttaaatgattggtctgagtgggtttttgtagtttaagatgaaggagagagaggcagagtttcggggaagtagggaagaggaagaggcctcacacatggaaaccagagctctgtagaaagaaattggccccaaatttcttaatctcccaagggattagcagaactatttggtagagctttggaacggcatacgactgggaagtggggacttcaaggcatttttttaaaagatatcaaaggggcagagagctctctggctgtcatccactctgtaattataatattgaaaacactttccaaactatctccaccaccacgcccaacagaaataaagaaaatccacctggcctatgaccctaaattagaatccttcttcatcagggcttctgaatgacaaaacttggatgtgatgggtgggaagtagagaagaaaagtgagaatgataaatgactccaagaaaatagagaagctagtggaatatgagatgggtgaattcaagttttagaaaagattaagaccactaaatatgtagacgcagagcaattctgaaggaggtttattgattttctttttttgagacagggtctcactctgttgcccagactggaatccagtggtgcaatcaccgttcactgcaaccttcaactcccaggctcaagtgatcctcccacctcagcctcttgagtagctgggactacaggtttacacaccagcctggctaatttttttattttctgtagagacggggtttggccatgttacccaggctggtatcaaactcctgggctcaagtgatctacccatcttggcctctcaagatgctggcattataggtgtgagcctccgctcctggccttacacatgattttatgagtattttttaatgaaatgcttcagatttataaaacatattagagagtaataaagcaaacacctctgtttctaccaaccacttaaaaaaattttttttgtctttatgtagtcaacaaaccttgtagactgatttgagtctttaagccataagcatgcatggctgtgataagcataaaaaatgaaacgagttatttagaaataaaaactaatatttaacagagcagtagaagaaattttaacaataaaattacagcatccatatcttctgtagtcaaaacggactgttttaagcagtagtttttcttcaatgaataagtaattatatccagttttttaaaaatagatccctatgaacctctctcttccctctccttcccctctaagataaccactatcctgaatttgatgtttctcattcctacatatatcttttttttttttttttttgagacggagttttgctcttgttgcccgggctggagtgcaatggcacaatctcggctcactctaacctctgcctcctgagttcaagtgattctcctgcctcagcctcccaagtagctgggattgcaggcacccaccaccacacctggctaatttttgtatttttagtagagatggggtttcaccatgtgaccaggctggtcatgaactcttcacctcaggtgatgcgcctgcctcagcctcccaaagtgctgggattacagatgtgagccaccacgcctggcctcttttttttttaatttattttattttatttatttttttaaattataaaacattttacagtgctttttaaataagtctttgaaacctagcatgtattttacatttacagcacatctcggctgggatttgctgtgtttcaaatgcttatagccatgtgtggctagtgactgccactgggatggcaccaccgtctagaccttgtttcttaaagcatggttcttgaaacaatagcatccaattacctagcaccttgtttgaaatccggaatctcaggccccaccctagtgccgctgaatctgaacctgccttctaatgagatcccaggtgatttgtgtgtacaacaaagtctgaaaagtggctatggaatctcttagagacctaaagatctaggactctgtgaacaggtttcttgttcacccattcattcaccagatatgagccctgttaatccctgactctgtgccaagcagcgtcgggtgctgaggataaaccggagaatgactcatacatggcacatgccttcaaggaggttaccatctgttgaaagtcatggaaaatgaaaatctgccgggagcagtggctcacacctgtaatcccagcactttgggaggacgaggtgggtggatcacttgaggtcaggagttggagaccagcctggccaacatggtaaaaccccatctctactaaaaatacaaaaattagccatgcctggtggttcacgcctgtaacccagctacttgagaggctgaggcaggagaatggcctgaacccgggaggtggaggttgcagtgagcccaggtcacgccactgcagtccagcctgggcaacaaagcgagactctgtcaaaaaaaaaaagaaagaaagaaaggaagaaaagaaagaaaggaaagaaaggaaggaaggaaggaaggagagaaggagggaaggagggaaggagggaaggagggaaggaaggaaggaaggaaggaaggaaggaaggaaggaaggaaggaaggaaggaaggaaggaaggaaggaaaaagaaaaggaaaagaagaatccaaacagagaatcaagcaaaaatgaaaattatggtattatgattaagaacatgggatctggagttaaccagctattcttggacaagtttcttcacatctccgttcctcagtttcttcatctctatgtgtgggatcatctttgacgctgggcactgttgagtatctacctggcaaccatcattcttttcctttgtttgtttgtttgactcggagtaaaatcacccaggctggagggcagtggtgtgatctcaggtcactgcaacctctgcttcctgggtccaagcgatgcttgtgcctcagcccccaccaggtagctaggattacaggcggataccaccacgcccaggtaaattttgtatttttagtagagatggggtttcaccatgttagccaggctggtctccaactcctggcctcaagtgatcctccaacctcggcctcccaaagagctgggattacaggggagagtcaccgcgcctggcctctttccttcttaatagcagactctgactttgttctggttcattcctcccctgtgtgccccaggcaacccagaaagagctgagactaatcccagctcttcctcatgtggcattttcctggccattgttctgaatgggtcacatgcttatccccgaaccagtgactggcgagaggaatatgacgttctgattaccaatccctgcatcccaggtccacccctggactcagggttagagtgaattccaccagaagcccatgagctgggctggggaaatgacagcctgaaggtcaaagcacaccttcccttctattgcacagccttttcctgtcagagagagactaagccacaaacagaaataacctgtaaagaaagttttcggctgggcatggtggctcacgcctataatcccagcactttgggaggctgaggtgggtggatcacctgatgtcaggagttcgagatgggcctggccaacatggtgaaactccgtctctactaaaaatacaaaaattagccaggcgcagtggtgggacctttaatcccagctattcgggaggctgaggcaggagagtcgtttgaacccaggaggcagaggtttcagtgagctgagatggtgccattgcactccagcctaggcgacaagagcaaaactccatctcagaaaaaaaaaaaaaaggaagctttcttgagaacatacaatgtgccaggcactacacatgacatccactgttaccagtgagcccatgtcatgcaacgtaaatcattttatcgtcaattaaaaagatgaaaactgggccgggcacagtggcttacgcctgtaatcccagcactttgggaggccaaggcaggcagatcacttgaggtcaggagttctagaccagcctggccaacatggtgaaaccccatccgtacttaaaaaaacacaaaaattagccggacatggtggtgggcacctgtagtctcagctactcaggaggctgaggcaggagaatcgcttgaacctgggaagcaagggttgcagtgggccaagattgcaccactgccctccagcctggatgacaaagcaagactccatctcagaaagaaaaattagaaaaagatagactggataagaaaatgtggcacatatacaccatggaatactatgcagccataaaaaaagaaagagttcatgtcctttgcagggacatggatgaagctggaaaccatcatccttggcaaactaacacaaggacagaaaaccaaacaccgcatggtctcactcataagtgggagctgaacagtgagaacacatggacacagggaggggaacattacacaccagggcctatcagggggtgggggcaaggggagggagagcattaggacaaatacctaatgcatgcagagcttaaaacctagaagacggattgataggtgcagcaaaccaccatggcacatggatacctattaataaacctgcatgttcagcacatgtatcctagaacttaaagtaacataaaaaaatctaattgtattgcacatatctaattatctgacaattccacctctaggtacctaccaagagaattactctcacatgtgcacaaggaggtaaagcgaggctgtttacagcaccactgctggcaagtgtggaaaattgacaacaggaggcaggtgaattggtagaggaacaggtgcaggtactgcattacagattgttcactggctgagttcaaggaggctattcctcaacatgggataagtctagaactacaagcatgaactcattccctatacataatgttaaaagtgaaaaataaccaagttacaggaaaaaagtgggaagagaatgaagctatttgtattttttaaaaccttacttatctatgcaatgcatgggaaaacatcatgaaaaatacacatcaattcatagcaaggattattttcgaggaggggacaggactgggcaaggcagggaattaaaggattacttttgtttttctatattattggaaagacttacaagactcttcacattttcttgggaaatttttgtagtaggatgagataagactcagttaaaaggaagaccgccatttggtgagtgattcaaaatcttgttagttcagatttccctgaaaaaaaaatgcacattttgcacatttatttaaaactgtgcactcaggggattcacagattcactgctagttgtccaagagacccagtggcctccggtttaacacacctgcagtggagagaaagaacatggtagattaaccaagaccccgaattatctgctgcgcggcccatggagaggtgggatctaattcttcctttgagtacaggccagccttagtgattggcttgccaatggaccacaacagcagaggtgctctggcccttccgaggcaggtgtcagaagcgttgcttgctgattctgcaggggacccctggaaacactccctccggggaatccagcatctgtgtgaggagtctgaggcttccgtgacgtcaccatgctggagaggccacgtgtaggaggcagtcccagctgagcccagcctggcaggcatccgagctagggcccccaatagtgagtgcagccaccttgtatcttcccagccagctcatctgccagctgtggagcgacttccagcaacaccagtgaggagcagaaaaaattttccaaattcctgacccacaaaatcaagagatacaatagtttgtgataggtttattatatatataatatgtaatatatgacttattataaattaattgtgagattcacagtctcacaaggcagatgtggaaataagtaattacattatattgtgaaataatagatgtcatcattatataaaacttataattatgtaagttgtacataatttataatacatgtaatagaaaataggttgtagatttaagcaccaagttttagggcagattgttaagtggcagtcgctgaaacagggtgggactgcacgctgcacgcctatgatcagggtgagggtggagaccctaggaaaagtaccgctctgcagactttgtgtcttaggagtgtcctgacataccgctgggaggattacctcatccattccttctttttcttttcttttttttttctttcctttttttttttttttttttttttttttgagacggagtcttgctctgtcgcccgggctggagtgcagtggcgcgatctcggctcactgcaagctccgcctcccgggttcacgccattctcctgcctcagcctcccgagtagctgggactatgggcacccgccaccacgcccggctaattttttgtatctttagtagagacagggtttcaccgtgttagccaggatggtctcagtctcatgacctcgtgatctgcccacctcgacctcccaaagtgctggtttacaggcgtgagccaccccgcctggccatcctcattccttctttccttccttttcttacttccttttctccccagacattaattgagcacctgctaaataagaataaagtataagtcagtctctggggaaacacaaattggttagatacggtccctgttctcaaagagtcacaatcttacatgggcagacatggaaataaataattacaacctattgagaaatagtagatttaatcgtaacagaagtctttttataattataataaaatattagcattaactggctttatgtaatgaacatattttatcctcacaacaatcatactacgtgggtcctataattatttccattgatcagataaagaaactgaggcacatataagttaagaggtgcatccaggatgtgagtagtggctcgtgcctgtaatcccaacatgttgggagactgaggttgtaggatcgcttgagcccaggagttcgagatcagcctaggcaactgagaccccatctctacaaaaaatcaaaaaactagccggttgtggtggcgcacacctgtggtcccagctacttgggaggctgaggtaggaggatttcatgagcccaggaggttgaggctgctgcagtgagcctgggtgacggagtgagatcctatctcaaaaaaaaaaaaaaaaatcacaaagccacatttgatggaaaaatcaaaatcaaaagttcagtttcaggagtgttaatttgttgatgtatattagaaattcattggtgcattccagtggcccatcgtaaatgaggctaaacttttaaaggaggagatttcattctctaaaaaaataacctgctcagattcatagagacacaaagtagcatgatgggtgccagggggtgggagggggaggtggggagaccacatttaatagggacagagtttcagtttgggacggtgaacaagttctgcagatggatgctgctgacggttgcacagcaatgtgagtgtatctaatgccggagaactgcacgctttaaaatgagtaaaatggtaaagtttatgttactcatattctgccacacacacaaaagtagcctgaatttttgtactctcttgacaagttggaagacctggcaaggctgtgacgctccacgctgcacggtggctgctcctcacctgggctgggtccccagcacacatcagccactctcctgccctctcctgcattgcttaatgacccattgacacccaggctcatggctccacagaggtcccagccggctgcccggagaacattcttctttctggatgatgcccctggcttcctgcagcaccaaggcccagaaagggttagcgtagaagagtcaggctctgaggcagtgcaggacggcagggctgggccttctgcttctagcctgtctctaattatgatgattgttgctgcccaatgatgagccaactctcctgccagcattaaacagtcatttatcaaatcctgaaactccttcttcaacggaaaagcgtggcctcagccctgcactcgggcacaccgaagccactcaaatcaccccttgtcagtgtttgaggccagggttcctggcctgctcggaccccctgacatgcacaaggaagagtgaaagcaaggctgggggtcaccatgggagacacatctgctgtcaccagtgtgtgtgtgcacgtgtgtgcctgtattaaagatgcttagagttcagacatagcagcttttgcgtgtgggtgagaccctgtgtccatcccaggaacagctctggcagccctgagtctcagtccacagactgagggaggagggagggaaaacaaagtagctttgtttccttttttgtttttttttgtcagacggagttttgctctgttgccaagctggagtgcagtggtgccatctcggctcactgcagcctctccctcccaggttcaagcaattctcctgcctcagcctcccaaatagctgggactacaggcgtgtgccaccacaccaagctaatttttgtatttttagtagagatggggtttcacgatgttggccaggatggtcttgatctcttgaccttatgatctacctgcctcagagtgctgggattacaggcatgacccaccgcatctagccccccccttttttttttgagacggagtctcactctgttgcccaggctggagtgcagtggtgccatcttagctcactgcaacctccacctcccaggttcaagtgattctcctgcctcagcctctcgagtagctaggattacaggcacatgctaccatgctcaataaatttttgtatttttggtagagacaggatttcaccatgttgcccaggctggtcttgaactcctggcctcaagtgatccaccctcctcagcctcccaaagtgctgggattacaggcgtaagcctctgcacccagcctctttttaattaattaatttattcatttttctttatccaatcagtgtcatacattgaactttttaatttttttaaaagtccccctacattattttcctagggctgctggaataaattaccacaaactgggtgactttatttatttgtttgtttgagacagggtctctcttcatcacccaggctggagtgcagtgttgtgatcacagctcagtgcaacctccacctcccaggctcaagccatcctcccacctcagcctcctgagtagctgggaccacaggcacgagccaccacacccagctaatttttgtatatgttggatatatacggggactgcttacgttgcccaggctggtctcaaactcccgagctcaagcgatcctcccgcctcggcctcccaaagttctaggattacaggcatgagccactgcacctggcctaaactgagtgactttaaacaacaggcatttattacctcacagttttggaggcctcaagtccaaaatcaagttgttagcagagctgtgctccctctagcacgcccttcctggcctcctccagcttctggtggttcctggtgatccgtggctgtggctgccccactccaatctctgcctccatcttcatgtgcatgggtttcttcccgtgtctctgtatgtcttctccttttctatctcattggccttagggcccactctcatccaggataacctcatctccagattctgaccttaatcacatgtacaaagcctctccttccaaataaggtcatattctgaggtttcagatggacaaattgtttttgggggagacataattcaactcaccacatcctattacctcagcctttggtcctccaggccactgtgcccatggaatatgtcatctcagtccttccagggtttgtagcacagtcctgcaaccttcagcatggaagtggggtgagggtgggagaatctggtcctcagctatcagtccacccagaaaaacaccacggcggcccttgtccttgtctacatagcccctctagagtttccatgcaacaaagaaccattgttggctgggcgtggtggctcatgactgtaatctcagcactttgggaagccgaggcgggcagatcacttgaggtagggagttcaagactggcctggcctggccaacatggtgaaatcccatctctactaaaaatacaaaaattagccaggcgtggtggcacacagctgtaatttcggttactcaggaggctgaggcaggagaatagcttgagcccaggaggcagaggttgcagtgagctaagatcataccactgcactccagcctaggcaacagagagagactctgaaaaaaaacaaaaaacaaaaaaaaaaaaacgttgttatgggactatagcattgcacaacttcagagggcaccatttcccagtggccgtgacatgcacaactgcagagtcagatgcagcagcccctgtaggcaagaatctttcaggactgcctccgaggacaggtgacttaagtttaaatccccacttgggcacttcctagctgtgcaatttagggtaacatacttaacctctctctgtagagtatccttatcttaaaaaaagggataggccctgaggaggtgagaaaaacaattacaatattgaagacaaggataatagtaatagtgacttcataggattattgtaagggtggaatgaattggtgtcttcgtggcacacagcaaatgctctaagtgtgtgtgtctattgtgattgttatgatctgagctgcacacaccagagcacatggattggaattttacaacagagtttttttgtcccacctgcattttttaaattttaatgtaatgtatttataaagagagatttacataataatccaaatttctaacctctctaaaaaaaaaaaaaaaaaaaaaaacctgaaaacttggtgatatggtttggctgtgtccccacccatatcaaattgtatcctcccataattcccctgtgttgtgggagggacccagtgggagataattgaatcatggggcagtttccccatactgttctcttggtagtgagtaaatctcaagaggtctgatgattttataaggggtttcctctttcacttggctctcattctcctcttttgtctgccaccatgtgagacgtgcctgttaccttccgccatgattgtgaggcctccccagtcacatggagctatgagttcattaaacctcttctgcaaattgcccagtctctggtatgtctatcagcagcatgaaaatggactaatacagagggcaatattgcatttgcattgccatatggctgtcatcagtgacagctaagtagccataactcccatgaaatgggttgaagtctcctcatacccctcccaattctgtatgcacacacacacacacacacacacacacacacacacacacacacacacacacccctgagcccccctctggcctgcagttacctgaataagccctggtgaggctggaatttgccatctctgctctcctccaatcctttcattttcacagcaaggaaactgacacccagagaggttgtgtgacccaccccaagtcacacagcaagttgcaacgaaactgagactgagctcaggcctcttggctcccagcttctttgtcatcactaagatatttctaaatgtaggatgaccctgcttgatgtttcaagatgatagaaataaaaaagttgaaggctgggcagggggctcacacctgtaatcccagcactttgggaggctgaggggggtggatcacttgaggtcaggagttccagaccagcctggccaacatggtgaaaccttgtctctactaaaaatataaaaattagccaggcgtggtggcgcacacctgtagccccagctactcaggagactgaggtgggagaatcgcttgaacctgggagatggagattgcagtggcagacatcatgccattgcactccagcctgggcgagggagtgagactccatctcaaaaaaaaaaaaagttggatatccctcttcttattttacaaataatgctaagtattctgtcttggcataaagaggaaaccttagagagctacctcccagaccagagtttctcaagtcggaatgaatttgccctcctggtgtctgaagacacgtttggttgtcactatttggggggtgctactggcatctggaaggcaaaagccacagatgccactgaacaccctacaatgcacaggacagcccccacaacagagaactatccagcccaaaacatcaatagtgtcaagattgagaaaccccgccaagatccttgcttctcaaagtgtggtccctgggtcagcagcgccagcaacacctggaagcttgtgagaaatgggaaatcttgggcccacccagacctagacaatcagaaacaattttaataacatcccaggtgattcactggcacattagattgcaagaagcatgctttatatatactcattggcacatcaggttgcaagaaccagtgtttctcaaccttgactgtaaaatagcatttcctgggagggagagggggtggtggctgaaaatcctaatgcccagggcaccctttggagcaattacattagactctctgggagtggaaaccaaatatccctttttttttttttttttgagatggagtctcgctctgtcgcccaggctggagtgcagtggcacgatctcacctcactgcaacctctgccaccagggttccagctattctcctgccttagcctcctgagtagctgggattacaggcagcatgcacctgtagtcccagctactcaggaggctgaggtgggaggattgtttgagcccagcagtttgagactagcctgggcaacatagtgatatccctgtctcaaaaatacacattaaaaaaaaaactttaactgcataaaatggatattatcacgagcaaaatcaattacatgtatacaaaggtattaatgtatttataaaaacaaatctgaggtatcataccctatgtgcttctttattaatgcatttaataacaaaattcagagcagggtttaataaccacgataattccaaagtcatgacaaggtgagtaatatttccagatatccacggctgctggaatgctatgggaaaagatccgtggcttcaaatggtggcaaagtggcaggtacttgtgccactgcatggtgtgttgccaactttcacaatcaaggaaatgctaagttagagttagaacttagagaaagtaactgtttgtagactttcccatgcaaggtcacagacctcctgaattctatccctgaaatccctggctctggtaaagggagacagacaagctgatgataatacagtgtgattaagggctaagattaggggaagtaatacaaaaaggggaactgcagttcccctttttaaatatgtctgcaggctgggtatggtggctcatgcctgtaatcccagcattttgggaggccgaggcaggcagatcacgagttcaggagatggagaccatcctggttaacacagtgaaaccctgtctctactagaaatataacaaattagctgggcatggtggcacacacctgtagtctcagctactcgtgaggctgaggcaggagaatcaacgtgaacccaggtggcggaagttgcagtgagccaagatcacaccactccactccagcatgggtgacagagtgagtctctgtctcaaaaaaaaaaaaaaaatctgcaaatttttagccagacgcagtggttcaaacctgtaatcccagcactttgggaggccaaggagggagaattgcttcaccccaggagtttgagaccagcctgggcaagatagcaagaccctgtctctgcaaaaaaatttttaaaaattagccaggtatggtggcacgcatctgtggtctcagctacttggcaggctgaagcacgaggatcacttgagcctgggaggtcacggctgcagtgagctgtgatcacgccactgcactccaggcaggacaacagagtgagactctatctcaaaaataaataaataaaattgcaaaattgcaaattttctgcaaatttttgatgctcctctcaagaggcagaatgtaagtcctcactaacccacctcccctgaatgtgcaagacttagtgctcatttcttttttttcttcttccttccttcctccctccctctctctttctctctctccttttctttcttttctttctttctttttctctttctctctctctctttctccttccttccttcccttcctccctccttccctccttccttccttcctttcctttccttctttctttctgacagagtctcactgtgtcaccaaggctagagtagagtggcgtgatcttggctcactacaacctccacatcccaggttcaagcaattctccttccttagcctcccaagtagatgggattacaggtgtgtgcaaccatgcccagctaatttttgtatttttagtagagacggggttttgccatggttggccaggctggtctcaaactcctgacctcaagcaatccacccaccttggcctcccaaagtgctgggattatatgtgtgagccaccacgcccggcatggctcatttgtcataactagaatacagcagaagtgacattgcatgacttccaaggccaggccataaaagacaatccggacatcaagtgtcagaaacatgaaagggaagtcttcgaaatgactccaacctgggtcatcgtctaactagggctgcaagaaccaccccgctgagccctgccagcccccgaatcatgagatacagtaacaacaaactattattattgttttatgtcaaacccagactagagagtgggaaaaaaatgttcctagaagagctggtgttgagctaagactgaagaatgagtatgaggtggccaagccagggcaagaagaataccttatgcaattcatgtcaattcaagaggacaatttttgtagccagctgccctagatttcacagaatgcccacattgcagacctccatgaaccccaaaacacttgagagatgcaaatatttcggtgtccaatttaaatttcccacactgcttcttggactcaactgctatatagatttcttttgtctgatcttgtgcaccaattttgggtttggaaatatggtcatgccccaaatcacggaaacaatcttcccttctacgtctgaagaatcctaggcttcagtgatcatgaaagacatcgccatcatctcctccttttactacataatcaagcatgaaataaaagacctgttaaaaaaaataaataaatatggggggtcaccatatccccattgtgtgatctgaaggatccccagtgggtccctactttcacccatcaacattcgccaacctccaattttctcatcctctctgttgtctgatattctactatcaacaatgcgtttcttagaagaaactctgcccctttccaaatcacatttttctcttttaaatgcaagtcccctggggaaagaaagaaatgactgtgacatttagtgctaacggtgtagtataaatttgggtatataatttcttttctactggagagaagagattaagaaacttgacaggatcctttgtaagaaagggaatgagatgagaggtacaagtctggtgttttgggtggctccacattttttctcctcttctcttgataacagcatcctgatttcctttgggaaaccactactcattctcagtgagtctagtttggctgtggctgactgctccatccagctgcaaagatgagcaatctgacctgaccaatcagagtgcagcatctccctgggtacaatgagaggttcagtgattagcacctgacccaagctaagtcaataagaatcttacctgggactttcagaagaaccactgagaaagaagtcaaaaaggattattttcttttttttttttttttttttttgagacagagtctctctatgtcgcccaggctggagtgcaatggcacgatctcggctcactgcaacctctgcctcccggcttcaagcgattctgctgcctcagcctcccaagtgacggggattacaggtgtgagccactacgcccagctaatttttgtatttttaggagagacagggttttgccatattggccaggttggtcttgaactcctgacctcaagttatctatttgcctcagcctctcaaagtgctgggattacaggcgtgagccactgcacccggccaaattatcttattttctgtccaacttcgccctccagcaaactaggagtcatcaattcataatcaggcactggtcagatgaaaatgctttagacacacaggtaaacatgagttagtgtccagttagtatagaccagggatctgaaaattataaccttccagtcaaatccgatgcccccacccccatgtttttgtgaataaagttatgtatttaggtgcaatggctgattttgcacacaagtagcaaagttgagtagctgcaacagagaccagcaggcccacaaagccaaatatatcaactatcagtccctttaccaaataagtttgccaacccctggtgtcaagccgtggagaatgtgtgtctggagatgtagaatctgggactcagaaggctcttgttaggttagaaactttcgtcctggcaatgttacttataatgagcattcacccttcttccgtccttctctgcagggttaggtgtgtttgattgcattttctgcctgatttgattgcagccaactctttggcagcattgtcactctgaggctacagaggggacttttcagttaaacttttaaagtctgcagcctattacaaatcacagtactgctaaactgagacaaagaatgagaaagacctcttatccctctttaaacaacctggatccacgggcttcagcagctgcggtcatctggcaccagcccatcagacaagttgcaagaaaggaagataagaaatatgagctgggtgctcagtggctcacacctgtaatcccacactttgggaggctgaggcaggaggatctcttgaacctacaagtttgagaccaggctgggcaacatagcgaaaaccctgactctacaaaaaaatagaaaaaattagcagggcatgctggtacatgcctgtagtcccagctacttgggaggctgaggtgggaggattgcttgagcccgggaggttaaggctgcagtgagctgtgatcacaccactgcattccagcctgggcaacagagtgagaccttgtcaaacaaaaaaaaaagaagaagaagaaaaaaaaagaaacaaaaaaaaaaaagaaaaaaaaaatatgagttaggtaaagcaatgcacttttccagaaactcccagaaaggacataattaacccagggagaaggaatacctaatttaaaattagaaaaacgtaggccgaacatggtggctcgtgcctgtaatctcgacactttgggaggctgaggggggtggatcacttgaggtcaggagttcaagaccagcctggccaacatggtgaaaccccgtttctactaaaaatacaaaaattagccaggtatggtggcacgtgcctatagtcccagctactcaggaggctgaggcaggagaattgcttgaacccaggagacggaggtttgcaatgagctaagatcgcaccactgcactccagcctgggcaacagagtgagacttcgtttcaaaaaaaaaaatgagaagaatgatttggaaaagcaagaggcaacttctaagccttttcccccttgatgaataacaaaaattgtttaaacaatagtgattcacctttatcgaatatttactatgtgccagatttctctcaactggaataaattaactcatgaaatattcctaacaatgtgaggttgatactctcattgtcgtcatcttacagctgagaagattgaggctcagagaggttaagttacacaaccaaggcaacacagccaggaagaggcaatgtcaagatttgaacccaggctcctgagcaaccacactacactagagtgaaggttctactacagttgggtcaaggtagagagtgctatgtattatacttgcttataagccttttttttttttttctgagacagagtctcactctgtcacccaggctggagtgcagtggcacaatctcggcccactgcaacctccacctcccgggttcaagcgatcgtcctgcctcagcctcccaagtagctgggattaaaggcgcctgccaccaagcctggctaatttctgtatttttagtagagacagggtttcaccatattggccaagctggtctcgaactcctgacctcgtgatccacctgcctcagcctcccaaagtgctgggattacaggtgtgagccaccgcgcctggcccgcttataactcatttttaaaacctctctcttacatttcttcttcactttttcaacaacctaatattgaggacctaccagcctagacttaggccctagggccacaaagatgagtgaaaatcaatactattcaaaagcctaaatttctatccaaattattggtttaactcaaagttttgatttctgggcggggtgtggtggctcacgcctgtaatcctagcactttgggaggttggaggtgggcggatcacttgaggccaggagttcgaaaccagcctggccaacatggcaaaactccgtctctactaaaaatacaaaaaaattagctgggcatggtgacacgcacctgtaatcccagctactcaggaggccgaggcaggagaatcacttgaacttaggaggcagaggttgcagtgacctgagattgcaccactgcactccagcctgtgcgacagagcgagactctgtctcaaaaaaaaaaaaagttttgatttctgctggcaactcctctttgggatgctttaagctgttatcccatgttagagcctctgtataaatcaatgtttcgctagggacgttagccatcctccaaagattcatgtactctctttacaacatagagctgtttcaaagtcttctttgtgaaaaagaaaaatcaaccctcttcagcaggatgaatgtgacggcccagactagatgtgctgagctacctcagttagtagcctggtgacctctgggaaggtttcggtgcacatgctgatgggcctggaagcctttggttctgaaggatggagggatggaggcagctctggcattttgtgggtggtactgttcatatgtgtgctcgtgtgtgtgtgtgtctgtttagtgtgtttgctttgggcagaagggtaccccaaggaagtgatttggaagggaggaaggcaagaagaaggtattacagctgtcacccttggaactggttttaaaagaggtgataatggaagaagctgattcacaagaaacttctaggagactctaagcccaagcgatgttgcttgggtagagctggccagaaagtgaggcactcattttgggcacaaaaattcaaggggtagttccaaaacttcagtaatcatggtaaatattttaatgcaattttttttttttttttgagacagggtctcattctgtcacccagtgtcacccaggctggagtacagtggcgcgatctccacacactgcaacctctacctcctgggctcaagtcattcttccacctcagcctcctgagtagctgagatcacacacctagctaatttttgtattttttgaaaggacaggctttcgccatgttgtccaggctggtctcaaattcctgagctcaagcaatctgcctgccttgaactccccaagcactgagattacaggcatgcaatatttttttaaaaatcaaaattaatgccaaaaattccatgacgaacaaaataccaaaacttaaaggacaggactggggggccctggggacaacatgtagcgatgagctggggagagaaagcttctagcagcttctgcaaggaaactacatgtctccggcccctcaggagaggggcccttgggggctttcagaggcagagcctgccgcagacactgagtacttcagaggtgcattgcaacaaggcagggtgagacaccgtgatggggagtgcatgtcagctctgcttctgagtctggatgaaaatccggccacagactcctccagagagttgtggaggaagggaggtctttaaccctccaattatgggctgggagccacgataacttgaacatcagggagaaagtactcatggctagtgaagcacacatgtgtttatttatttttacaacaaagacggatgcccctcctaggtgccaagtatgcttagccacaggggacacagagcaccaggaggcaggaaaccagtcaacccatggtcaaggaatcacaaattatgaggtggcctcagtgaaggagagcagaaagggtctatgtcaagatcacaggcttgatcccaaggagctacctgagctgaggttaatatctgcctctgcctctccatttcccactcttttcccagtgctttttttgagacactgtcttgttttgtcacccaggctggagtgcagtggtgcaatctcagctcactgcaacctccacctcctaggttcaagcaattcttctgcctcagcctcctgagtagctgggattacaggcatgcaccacgatacccagctaatttttgtatttttagtagagatggggtttcaccatgtcggccaggctggtctcgaactcctgacctcaagtgatctgcccaccttggcctcccaaagtgctgagattacaagcgtgagccaccaagcccggcctccagtgcctctttactccctttttgtcttgccttccgtcttctcttttctttccttttcctatgccattggaacctcccagcctcagtcctctggtagaatttgaggctgagcaagttcattacaaaaatatttctgagctaggcatggcggcacatacctgtagccccaactactccagaggctgaggcaggaagttacttgagcccaggagttctagctataatgagcaatgatagagcctgtgaatagcagccattttactccaggctagccaacacagaaagactccttctataacactttttaaaaatatttctgagccgggcacagtggctcacgcctgtaatcctagcactttgggagactgagacaggtggactgcctgagctcaggacttcaagaccagcctgggcaacatggtgaaaccctgtctctactaaaatacaaaaaattagctaggcacagtggtgtgtgcttgtaatcccagctgcttgggaggatgagacaggagaatctcttgaacctgggaggcggaagttgcagtgacccaagatcatgccactgcactccagcctggtcgacagagcaagactccatctcaaaataaataaataaataaataaaaataaaaatatttctggcccaggcacagtgtctcatgcctctaatcccatcactttgggaggaagacacgggcagattgcttgagcccagaagtttgagaccagcctggataacatatcgaaaccccatccctacaaaaactatagaaattagctggctgtggtgttgcatgcctgttgtcccagctactccgaaggctgaggtggaaggatcgcttgagccgggaggtcgaggctgcagttagccgtgagcatgccgctacactccagcctgggtgatggagcaagacgctgtctcagaaaaatatgtacatatttcttttatttttttctgagacagagtctctgtcgcccaggctagagtacagtggcccgatctcagatcactgcaagctccacctctcaggttcacaccattctccttcctcagcctcctgaatagctgggactacaggcgcctgccaccatgctgagctaattttttgtatttttagtagagacggggtttcaccatgttagctaggatggtctcgatctcctgacctcaggtgatcttcccacctccgcctcccaaagtgctgggattacaagcgtgagccaccgcacctggcccatatttctgatataaaaataggtgggggctgggcacggtggctcacgcctgtaatcccagaactttgggaggccaaggcaggcagatcacctaaggtcaggagttccagaccagcctggccaacacagtgaaaccccatctctactaaaaatacaaaaaattagccaggagtggtggcaagcgcctgtaatcccagctacttgggaggctgaggcaggagagttgcttgaatctgggagtcgaagcaaagacctgggaggtgagcagagaccgcgccactgcactcaaacctggacaagagcaaacctctgtctaaaaaaaaaaaataggtgggaaacaagaaaaaagaaaaaaacaaaaaaagagaaaaaaacaggtgggaaacaaagagaaaaaactcaaaattctatattcagaatgatctagagtatgtaaaaatatgttcatttaaaaaggcaaaaataaaacaaaaaaaactggaaggaaggcaatgacaatgatcctggccttggaatgctgggacctgagaaataagcccacctctctacattcagatgtttttccaaaaaaaatataaaatttttaaaaatggaccaggcgcagtggctcacgcatgtaatcccagcacttgggcagatcacttgagatcaggagttggagaccagcctggccgacatggtgaaaccccgtcactactaaagacacaaaaattagccaggcatggtggtgcgtgcctgtaatcccagctactcaggaggctgaggcaggagaattgcttgaacccgggaggcagaggttgcagtgagccgagatcgtgccactgcactccagcctgggcgacagagcaatactccgtctcaaaaaaaaaaaaaagtttctaattagacctaggctagacttagactccagaaataactaaatagaaaaatatacgttatcttccctcataagaaaatttacagatgatatttctgtgaacatgagattaaatcctatggcctttcattatgacattttaaaatttatgttctgcctcatttcacaaaagacttaaagcagaaatttggacatattttatggaaataactatttagctgagactatgctccattgctgtaatattcaaaatggggttttttaaaattatatattcagaggaagaagtcccgggcattataaagaagagacattaaatcagaggacggcaaatgttttctgtaaaaggccagagagtccgtgttttcagctttgcagattatacagtccattccaccattaactcactctgcccttgcagcaggaaagcagccacagaccacacgcaaaccaacaagagtggctgtgttagcagaaaaccttatttatggactctgaaatttgaattttaggtaatgttcacacgtcatgaaatattactcttcttttacttttttttttttttttttgagacagagccttgctctgttgcccaagatgaagtgaagtggcgtaatctcggctcactgctgcagcctccacctgccaggttcaagtgattctgctgcctcggcctcccgagtagctgggattacaggcacgtgccaccacacccagctaatttttgtatttttagtagagatgggatttcaccatgttggccaggctggtcttgaactcctggcctcaggtgatccacccaccttggcctcccaaagtgctgggattacaggcatgagccaccacactcggcctcttttactattttttaactatttaaaaacgtaaaagctattcttagctccctggccatactaaaactgagagcaggcaagatttggtccacaggcagtaatttctggaaacctgttcgagagcaacgttttccagtgtttcctgagacaaaacccttcctggagatggtaattgatgtctttcaaaaatagagatacgagacaggcgtggtggttcacgcctgtaatcccagcgctttgggaggccaaagtgggcagatcacctaaagtcaggagttcgagaccagcctggccaacatggtgaaaccccaactctactaaaaatacaaaaaattagccaggcgtggtggcgggtgcctataatcccagctacttgggaggctgaggaagagaattgcttaaccccagaggtggaggttgtagtgagccgagatcgtgccatggtactccagcctgggcaacaggagcgaaactgcatctcaaaataataataataataataatatatatattatatatatatgtcggactctcagtcaagtaaagttgcatcaatactaagtttaatgagtattttttctagagaattctgagtctctgttgtgctaaggtacatggtaaatccccaagagatgcacctattatccagtggtgaatcttattattcattataaacatcttattaataataatcatataattaatgttactacatggtgaccttctgccagaaaccatgctgagcattttgtagggattaacacatttgctgggcacagttattcatgcctgtaatcccagcactttgtgaggctgaggcgggaatatcgcttgagcccaggagttcaagaccagcctggtaatatagtgaaaccccatctctatgaaaaacaatagaaaaaattagcagggcatggtggtgcatgctcgtagccccagctactcgggaggctgaggtaggagggttgcttgagcctgggaagtcgagaatacagtgagctgtgatcgtgccactgcgctcctgcctgggcaacagagcaagaccctgtctcaaaaaaacacaaaacatggattcttcactagagttaagaatctgtgagataagaatcattgttaataacttattctacaacattaatgtgccaaagaacacagttttggaaatgcaactctagaccctagaacagggtttctctacctcagcactattgatattccaaagcttctttgttaccagcactgtcctgtgcattgtaggatgtttagcagcattcctggtctctacccaaaatgctaggactaccctcccatcccaattgtgactacccaggatgtctccagatattgccatatgtcccatgggaggcaaaatcactcccactcaagaaccactgctggaggctgctccaaaggtagtgagttatctcaattcattgttcacagtccgttacagatagaactcctggttctactctttccccttcttactactgcactcgactagccttaaccaataaattaaaacatatatataatatttttatatactatgttataacatataatgtgtacacgaaattatatgtaggtcagggtgtggtggctcacgcctgtaatcccagcaccttgggaggctgaggtggggggatcacgaggtcaagagatcgagaccatcctggccaacatggtgaaaccccgcctctactaaaaatacaaaaattagctaggcgtggtggcacacacctgtagtcccagctacttgggaggctgaggcaggagaatcacttgaacctgggaggcggaggttgcagtgagccgagatcacgccactgcactccagcctggcaacagagcaagactctgtctcaaaaatatatatgtatgtgtgtgtgtgtgggtgtgtgtgtgtatgtatgtacatataatatatacaattatatttataacattatatataacatatatatgacatatatgttatatataacataatatataatattatatatataattatatatttttttaaaaaccactgctatacagtctgtagcaatgtgtgcagattttttagtggaaactgtatcagaatgatcttttaactggatttgaacaaacttagtcctgggacactatcttaaaaacagttggtagtcgtggcttatggtgtaatcaacaaaacaagtattgctatctctgataaatcatcatgtgcgctccttgtaacactttctggatattctaaaatattctagcctttgacccaataattccacttctgaaaaatctaaccatgaggaaatcggaaatgtgaacaaaggtaaatgcacaaaaatatcaacatagtgtttctataaataacgaacactccaaagaaaccaagactcagcttagggtattggtgtcaaaatgtatgtttcattcatcagtggaaggcattacattgttcaaaacttatgactacaaagaatattaataactgggggaatgttttctcttataccattaagtaaatgaaagaggacccaattttgatgataaagtttaatcttggccaggcgcagtggctcactcctgtaatcccagcactttgggaggtcgaggcatgtggatcacctgaggccaggagttcaagacccgtctggccaaaatggcgaaacctcgtctctgctaaaaatacaaaagttagccaggcgtggtggcaggcgcctgtaatcccagctacttgggaggctgaagcgcaagaattgcttgaacccgggaggcagaggttgcactgagcccagatcgtgcccctgcactccagcctgggcaacagagcaaaactgtctcaaaaaaagaaaaaaaaatgttcaatctcaaaacaaaatgttaatgtataaaaagaacagtgctcaaatgttaatacttcaaaactgtgaggttaggctgggcctggtggctcacgcctgtaatcccagcactttgggaggctgaggtgggtggatcacttgcggtcaggagtttgagaccagcctgactaatatggtgaaaccccatctctactaaaattacaaaaattagccaggcatgttgtcatgtgcctatagtcccagatactcgggaggctgaggcagaatagcttgaacccaggaggtggaggttgcagtgagctaagatcgtgccactgtactccagcctggtgacagagcaaaattctgtctcaaaaaaaaaaaaaaaaactgggaaattatgagtattttctttttctatgaccaactaggggtagttcttaatttgccaagaaacctttctcttttctaaagcaactgaagaaaccagagaagagtaaagctcattcgttgttgctactgtttggatgcactccttagcactatgtcctcactagctgtgtacaggtgcaaggtctggtgtcctcatctataaaatggggatgataaaggttcctatctcaaatgtagttgtaacatttaaatgagacaatgcatgaaaaatgcatggcccattggacatgctccgtaactgcgaactatttcccggtctgtggaaatgtacaatgtgttcggggaaattcagatgagttattctttctttgttatcttgatttccttaagaatttttctcaaaccaaaagaattaacacctttaaaacaatgccttccaacactgatctttatgcaagtctcaatgaagttttcactgatttgtttttcatgagggttttttttttttttcaatttaaaggacagtccttcagtcttcaattatgtttttccaactgtcttggtttctcttttgtgaaatgatagtgagagtaaatgccagttggattttttgaataccctttcttacctggcaaaatcaaaacttggtatccttacaacggcatcagtttttttcaacattactggttaatgaattccaaaactctgggagctctggctgtccacccaaattaaaggttttcctggacgcttactttcatctgccgctgttgttgttgttgttgttgttgtgttgttttgttgttgagacacgttctcagtttgctacccaggctagagtgcagtggccccatcacagctcactgcagcctcaacctcccagacgccagcaatcctcccacctcagcttcccaagtagctgggaccacagatgcatgccactgcatctggctaatttttcattttttgtagagatagggtcttgctctgtcgcccagactggtctcaaactccttgtttcaagcaatcctcctgccttggcctgccaaagtgttgggattgtatgcgttagccaccaagcctggcttcatctgcttttcaagtaagcatgtcatgcaattgcctaccctaccaaaaaaaaaaaaaaaacagttctttggaggctaagcagtgccctttcctttgggtcatcatctgtgtgtgacaacataagtaccgggggaatcaacttaagatcttatggggcagctccagatgcaattgtcctgtagacaggaatgtatgcagggagcccttgctttccagcttaacaggtcagaatcctcactgtgacagtatgagccaatggctggtctggtttacatttgtttacccggagttctacagttgctgattaatttcctaaggttggcctagaaatccagtagctggtttattttagtttctcttgcagcctttgtttccaagttgcaaccaattgctattcttagctaatacttccctcgtgtggacagaagctgcaataccagtgcctgggagaaaaaccttttcctctgatccatttgaagtcctctctctaacgggctgcctttaataaaactaaaagctgtctctacctgcgtctgggttctgagtgctgtagagagagaaggtaacccaactgagtagagactgctctaggttgtgagtgcaaatcgaggcttcactgctgggatgacgccccctcaggcctcagtttcctaataaatagaacaggccaggcacggtggctcatgcctggaatcccaacactttgggaggccgaggcggcagatcacgaggtcaggagatcgagaccatcctggctaacacagtgaaaccccatctgtactaaaaatacaaaaaattagctgggcgtggtggcgggcacctgtagtcccagctactcgggaggctgaggaaggaggatggcgtgaacccaggaggcagagcttgcagtgagcggagatcgtgccactgcactccagcctgggcgacacagtgagactctgtctcaaataaattaattaattaattaattaattaataaaataaaatagaacagtagccttcacacactaggtataagatagaaaagttaaaaggaaaatacagcatattctcctaggcataaattaaaattcaataaacattcactataactcagttcttgtagaaatttaattatatgcccagaatttatgtcacatatataacaaagtttcaaacgtattcaaatgttacagttaataagatacaaagccattcactagaccaataaatgtcttggtagtctttgttattaagggttgcctcaactaatatcatccattcatttattcaaaatatatttattcaggccggacatggtggctcatgcctggaatcccagcactttagaaagccaaggcagaaggatcacttgagcccaggaatttaaaaccagcctgaacaacatggcattaccctatctataccaaaaaatacaaaaattagccaggcatggtggtacatgcctgtagtctcagctactcgggatgctgaggtggaaggatcacttgagcccagagggtggaggctgcagtgagccgaggctgcaccattgcactccacactgggcaacagaatgagaccctgtctcagaaacgaaacaaaaaacaaaacaaaacaaaacaaaaaacccaaaatatatttatttagatgtattcactgaagacttagccaggcatgatggctcacacttgttatccagcaccttgggaggccgaagaggaggattacttgaggccaggagtttgacaccagcctgagcaacataatgagactttgttcctacaaagaaattcaaaaattagctgggtatggtggcacgtgcctataatcccagctactcagagggctgagataggaggatcccttgagtctggaagtttgaggtttcagtgagctacgattgggacactacactccagcctgtgcaacagagcaagaccatctttaaaaaaaaacaaacaaacaaagcaagtactattatttagactaaaagtctaggaaagagtatcacactaatatggggtcttaatattgcaaagtaaaagaaaaaaggagcagggtgacccacgtgagcaagcagttccactcctagttatacactcaaagaacttaaaaaggacattcagacaaaaacttgtccagcaatgttcacagcagcattactcacaatagccaaaagatgaagaccatccaatgtccgtactgatgaatggataaacaaaatgtggcctgcattaggctgttcttacattactataaagaaatacctggccaggcgcggtggctcacgcctgtaatcccaacactctgggaggccaaggtgggcggatcacgaggtcaggagtccgagaccagcctgaccaacacagtgaaaccccgtctctactaaaaatacaaaaattagccaggcatggtggcgggcgcctgtaatcccagctacttaggaagctgaagcagaagaatcgtgtgaacctgggaggcggaggttgcagtgagccgagatggtgccactgaactccagcctggggacagagtgagactccgtctcagaaaaaaaaaaagaaagaaagaaatacctgagactgagactgggtaatttataaagaagagaggtttattgactcacggttctgcaggctgtacaggaagcatagcagcttctacttccagggaggcctcaggaaacctacaaccatggtagaaagcaaagcgggagagaagcgtctcaaatggcgggagcaggagcaagagttgggtgggggtgctacacactcttaaacaactatatctcatgagaactcactatcatgagaacaacacaagaagatggtgctaaaccattcatgaggatccacccccatgatcctgtcacctcccaccaggccccacctccaacacggaggattacaagtgaacatgatatttgggtggggacacagatccaaaccatatgttggtctatccacatcacggaatattattcagctataaaaaggcatgaaacactgatccatgctccaccatgagtaagcctcaaaaacattatgctaagtcccagctgggctcagtggctcacgtctgtaatcccaactttgggaggcctaggtgggaggatcacttgaccccaggagttcccgaccagcctgagcaacatagtaagaccttcttgtctcctcaaaaaataaaaataaaaaaaattacccgagtattgtgctgaacacctggggccccagctactcaggaggctgaggcaggcaggaggatcacctgagcccaggaggtcggagctgcagtgagctgcgattgcgccactgccctccagcctgggtgacagagcaagaccctgtctcgaaaaaaaaaaaaaaagttacactaagggcaagaaaccagacacaaaaaccacataattccagtcatatggaatgcccagaataggtaaatccatacagacagaagctagattagtggttgccagaggctaggggagggaaggatggcgggtggtggcctaactgggcttccttttgagacaatggaaatattttgaaacttgataatagaggtggtggttgcacaacgttgtcagtgtactaacagctattgaattgtacactttaatatagtttttctttttgaatttttttcttctttttacatatattttgtttattggcctccagctttgcataatgtggtatattttatgttttgtaaattttacctcaatataaataaacatatacattttcaaaacatttttaaatgtgtgtgatgttctgatgaagaaaactcaggccctcgagcccagcagtctgtttccagtcccaactcagccatgtgccagcttttgtgtgtgtgtgtgtgtgtgtgtgtgtgtgtgtgtgtgtgtcatggagtttctctcttatcgcccaggctggagtgcaatgcagcaatcttggctcactgcaacctccgtctcccgggttcaagcaattctcctgcctcagcctcccgagcagctgggattacaggcatgcaccaccacacctggctaattttgtatttttagtagaaacctcaggtgatctgctcacctcggcctcccaaagtgctaggattacaggcatgagccactgcgcccagcccatgcgccagctttataaccttgaacatgttccttaaccactcaaaggctcagtttcctcacctgaaaaaggaaggatatgtagttccttttcttttggttttgtttagttttgtttgagacagggatctcatgccgttggccaggctggaatgcagtggtgcgatcacagctcactgcaaccttgaactcctgggctcaagcaatcctcccacctcagcctccagagtagctgagactacaggcacatgccaccagacctggttaatttttaaactttttgtagagatgaggtctcactacgttttccaggctggtctcaaactcctgggctcaagcagttctcccgcttcggcctcccaaagctctgggattacatatagttcctttccatgagtttgttgtgaagattaaacaacacatttatcacaattaagatagcatcaggatcagagtgagggttttgtagcaaagtttttgtttggttttgttttgttatttggaatcaatggagcaaaagcaaacacacacacacacacacacacacacacacacaaacacacacagagcctttgaagtgagacacgcgtttgaattttggctctgccacctacaacctggaccacattgggtaaagctgtttagactctcgaatcctcagtttcccagctccttaagtacaggatctcatctgaccttcctcattaatactgaatgacttcaatttaagcaacgcctgcatatatgactgctcactaaaatattatctgttgaggctggcgtggtggctcactcctgtaatcccagcactttgagaggcccaggcaggcggatcacttgaggccaggagttcaagaccagcctggccaacatggtgaaactccgtctctactaaaaatacaaaaattacccaggcatggtggtgcacacttgtaatcccagctactcaggaggctgaggcaggagaattgcttgaacccgggaggcagaggttgtagtgagctgagattgcgccactgcactccagcctaggcgacagagcgagactccatctcaaaattaaaaaaaaaaaaaatcattgaaatgataaaatagaatcttaacttttccagttattttacaggttatgataatcaaacatgtgacaacattaagcaccctggtagaggcaagatttgccaggcggctctcacatacccctgcctcccacaatactacccccgcctcccatgatatgatgagatgacaaggcactttacctctgcattatactccacaaaacccgtaatcccagacaatcatgagaaaacatcagacaaacccagatcagcagacattctacaaaacaccgagtccttcccaacactgtccacggaatgaaaaacaaggaaaatctaagaaatggtcacagacgagagaagactacaagaggcatgatgactgaatgcaaggtaggatcctgggacagaaaaaaaatcccaccactaatgggaaaactagggaattctaaataaagtaacataccagtgttaatttcttagtgttgacagatgcattgtgcttatgtaagatggtagcactagggccagctgggtgcagggttggaacttgggttcgaattcaggaactctctgcaatctctttacaactgttctgtgaatataaaattattccaggctgggcgaggtggctcaagcctgtaatcccagcactttgggaggccaagggcaggaggatcacttaaggtcagggattcgacacaagcccagccaacatggtgaaaccctgtctctactaaaagtgcaaaacttagccaggtgtggtggcgcctgtagtcccatctacttgggaggctgaggcatgagaatggcttgaacctgggaggcggaggttgcagtgagccaagatcacaccactgcactccagcctgggtgacagagcaagactaaaacttaaaaaaaaaaaaatcccaaaataaaaaagtttttttaaaaaagtgtgtgtataggctgtgtgcagtggctcacgcctataatcccagcactttgggaggctgaggcaggaggatcacaaggtcaggagttcaataccagcctggccaacatggtgaaaccccgtctctactaaaaatacaaaaattagccaggcatggtggcgggtgcctgtaatcccagctacttgggaagctgagacaggagaattgcttgaacccgggaggcagaggttgcagtgagccgagattgtgccactgcactccagcctaggcgacagactccatctcggggtgatgggggcagtggaggggggggagtgggtagtgtgtgtgtaaaaacattttgtgagctataaaatgtagccgaggtgaccttcctgtggcttcctggtcctctaatgacctctggcctgttgccacctctgcagcctgccagtccgatttgcctaaaactaattcactgaataatcaaatatcaaatgatcatttcactgacttttccaattgtgtttttaacagcttttttaaaagcaagaatattttaacagctttaacagaaaagtacaattttgattgctgattatgaaatgcaattgtctgaatagtagctaaccgaagctgatatgctgtctgagaagctgctggaagaatcctgaacatgctagaaagttggcaaaattgaaatcaatacaaactaaaacgttcccttatgaagtgttactttttccaatcaaaattccaactttttttatttttttcagacgtagtttcgctcttgttgcccaggctggagtgcaatggcccagtctcagctcactgcaacctccacctccgaggttgaagcgattctcctgcctcagcctcctgagtagctgggattacaggcacccgccaccatgcctggctaatttttgtatttttagtagagacggggttttagcatgttggtcagcctggtctcgaactcctcacctcaggcaatccgcctgcctcgaacacccaaagtgctgggattacaggcatgagccactgcgcccagcctccaacattctttatacagtagggtaggtttagctattcatgttcttcaaaagctcttttttttttttttttttttttttgacagagtcttgctttgtcgccaggctggagtacagtggcgtgatctcgtctcactgcaacctccgcctcccggtttcaagtgattctcctgcctccacctcctgagtagctgggactacaggcacctgccactatacccagctaatttttgtatttttagtagagacagggtttcaccatgttggccacgatggtctcgatctcttgacctcgtgatctgcccgccttagcctcccaaagtgctgggattacaggcgtgagccaccacacccagccttcaaatgtttttgaataacgtgttctattttatttattaggcaaattttagttcatttttgtcaatttcaccaatggcctatcagccttgtttttgtttttctaaaaatgaatattttaattaagtttaatttacataattttatttactacgctatttctccagctcctacgatgtactgggcagaatgtcatgtgcttggcagagagttatgaactatgaaccaaaccgaagtcatccttgacctccaggagtttgtggtgtgccaagggctgagggcaaataaactgatgctcacagccctgcaagtaacaggaaagtgggagtgcttcgggatcaggcaggagaggaggccctacatgtgggggcagccacagctaagaaagaacagccagctgagatctgaaaaatgaatagaagttttttttgttgttttttttttttttgagatggagtctcattttgtcgggcatcacttgaggtcaggagtctgaaaccagcctggccaacatggtgaaaccccatctctactaaaaatacaaaaattagccaggcgtggtggcacatgcctgtgatctcagctgctcgggaagctgagacaggagaatctcttgaacccgggaggcggaggttgcagtgagccaagatcacgccactgcactccagcctgggtgacagaatgaaactcagtctcaaaaaaaaaaaaagaaaactcaaagcccatcattgtttgaacccacaagatgcaagtctaatttcaacaaggaggggaccaggccaccctgaaataagatttttagagcctttctaatgtggaattcacattattgcaaatttggtacatactgtggaactctaacaagcctctaattcacaacttcagatttgcacaattcagatttgcagaaaataagacctcactgtgtcagctaaagtccaaacagaccaaatgctacttctcaaggtctttcagcttctcaactccaggtgtcttttgtatcgtagatgaaaggaggccattgggctggttacgacttatgactacttgctttatattaaggatcagcaaaaatcagtaagagtcactagagggtttcactcttttttttttttttgagacagaggttcactcttgttgcccaggctggagtgcaatggcatgatctcagctcactgtagcctctgcctcccgggtttaagaaattctcctgcctcagcctccagagtggctgggattacaggcgcccaccaccacactcggctaatttttgtatttttagtagagacgggttttcaccatgttggtcaggctggtctcaaactcctgacctcaggttatctgcccacctcggtctcccaaagtgctgggattccaggtatgagcccccgcgcccagccagggtttcacttttcaacgtgtgctgcactcacctgatcaccttcaactctaactgatagtatcaaggacaaatcaataaaagttcaaccaaaaggttgtctggccattgatttttaatgttgcatgttcacttccggtcaatgaaatggtagatcttgtcattctgcgactttgcactcttcattgtcttttttttttttttttaaacagggtctcactctgctgtccaagctggagtgtggtggtgccatcatgactcactgcagccttggcctcccaggctcaagcgatcctcctgcctcggcctccagagtctctgggactacaggcatgtgccagcacccctggctaacttttttggtattttttgtagacacagggtctcactatgttgcttaggctgctctcaaacttgtgggctcaagcaatcctcccacttcagcctcccaaagtgctgagattacaggcatgagccatcatgcctggcctcttcagtgtctttttattgaccacaagataatgcccacattttcttaaccagctcaccaccacctcctcagcctcttcgtaccctttcctggcagaaaactccttactcaagggcatccccctcctgatgatccccgaaatgtgccttgttgcctttaacctcctcccaagagggaagttcagaggcaacagccggtgcaaaccctcccagatccttgtgcaagcctcagattagacagctcttcttctaggaagccctcccaaccctcctcctgggggtcgggggcactgacagatgaagccttccagaaatggcaatcaagttcaatgaggtgggaggagcagctccggtcaaccccgtcggtgtctccgcatgaatattcagcctcatttggaattaacatcaatgatgcaatggccctcgggtcagacaccatgaaggaaaacacagctgtgctaagtccagtcacttaaaccctctgctaaacctccccacagcttcccatcacacctagagcaaaagctaaaaattgggctgggtatggtggcttacgcctataatctcagcattttggcaggccaaggtgggcagatcacctgaagtcagtagttcaagaccacctggccaacatggtgaaacctcatttctactaaaaattacaaaaattagctgagcatggtggcacatgcttgtagtcccagctacttgggaggctgaggtgagagaatctcttgaacccgggagttagaggttgcagtgagctgagatcgcgccattgcactccagcctaggcgacaagagaaacattccgtctcaaaaataaaataaaataggccgggtgtagtggctcacgcctgcaatcccagcactttgggaggccgaggcgggtgggtcatgaggtcaggagttcaagaacagcctggccaagatggtgaaaccacgtctctactaaaaatacaaaaaacttagctgggcatggtggtgggcgcctgtaatcccagccactcgggaggctgaggcagagaattgcttgaacccgggaggtggaggctgcagtgagccgagacagcaccaccgcactccagcctgggcgacggagcaagattcatctcaaaaaataaaaataaaaaataaaataaaataaaataaaataaaataaaataaaaattgggctgggtgtggtggctcacgcttgtaatctaaacactttgggaggccaaggtgggcaaatcaccagatgtcagttcgagaccacctggtcaacatggcaaaaccccatttctactaaaaattacaaaaattagctgggcctggtggtgcatgcctatagtcccagcttcttgggaggctgagaccagagaatcacttgaacccgggcggcagggtaggcagcagaggttgcagtgagctgagatcacgccactgtactccagcctgggtgacagagcaacactctgtctcaaaaaaaaaaaacaaaaaacaaaaaaaggaggtgtattgtgagtcataacctcaatttgttcatactttactctgctattttttccttttttaaaattgaagtataatacagccaggattggtggctcatgcctataatcccagtactgtgggaggctgaggcaggaggattgcttgaggctagaagttcaagaccagcctggtcaacagatcatctctaccaaagaaaagtttttaaaagatttttaaaaattagtcaagcatggtggtgcattcctgtagtctaagctactcaggaggctgaggcaggaggatcacttgacctcaggagttggaggctacagtgagctatgatcacaccactgcaccccagcatcccagtgacagagtgagaccctctctgtaaaacaaacaaaaaaactgaagtgtatatatatatatatatatatatatatatacacacacacacatatatatacacacacatacatatatgtgtgtatatatatatacacacacatatatatgtatatatacatatatatacacacaaaaagtgcccaaatcataagtgtagacttcaatttattttcacaacataaaccagcacccagaccatggaacgaaaggtctagaatcccaagcgtgtctgtacctgcttgctgtttgcccaccaccagcagcagcgcacacgccatcctgacttccagcagcataggctagtgctacccatttttgtcatttgcatgagtggagtcatacggaacacagtcttttgtgtctggcgtcttttgctctgcattatgtttgcgaagtttctccatgttgctctatgattgtagatcatccgttcttgtcactgtatactgaccactgcaaggagatgccacagcttactcatccattccattcttggcaggcttttgcacctttgctattttactttgtttgtttgtttgttttttagagatgaggtctcgctatgttgcccaagctgttcttgaattcctgggctcaagcgatcctcccaccttggcttcccaaagtgctgggtttacaggcaagagccaccgtggccagtttatgctattttaaagtaccaaactattggtattattgttcatgtactaccattatttctctacttaagaaaatctgtaaccagaataattgatatcacatggcacacccaaggaggtatttgtggcattaaagttgcatctgggctgggcacagttgctcatgcctgtaatcccagcatttgggaggtcaaggtgggcggctcacttgaggccaggagttcgagaccagcctggccatcatggcgaaaccccatctctactaaaaatacaaaaattagccaggtgtggtggcacacacctgtagtcccagctactcgggaggctgaggcatgagaatcaattgaacttgggaggcagaggttgcagtgagctgagattgtgccaccgcactccagcctggaagacaaagtgagactctgtctcaaaacaaaacgaaacaaaaaacaaaacaaataaagttgcatctgaatagaagttcaagaagccttgtgatctctgtcatcctgagtttcattcccatttggggcgaatggtgagttggatcattttccttgctagtcgtctttaggtcccacaaaccacactaagcctggtccatttccagaagtttttttgttttgttttgtttttttgagacgaagtttctctcttgttgcccagcctggaatgcaatggcacaatctcagctcaccacaacctccgcctcctgggttcaagtgactctcctgcctcagcctcccgagtagctgggattacaggcatgtgccaccacacccagctaattttgtatgtttagtagagatggggtttctccatgctggtcaggctgatctcgaactcctgacctcaggtgatccgcctgcctcggcctcccaaagtgctgggattacagacatgagccactgcatccggcccagaagttcttgatggatccatctgcaaatgagggatagagggaagagaagtggggagagaagaaggcaggaggaaggggtgagagaaccaggagaggggagcgcggctccaggctcaaccccaccccgcctggagcttgagcaactccttcccttccttcaggactggctttctcccttttccctccagggccaaatcctgtctcttaggacttgactcctccttcccagggtcatttactttcccctgggctttcttgccttacatcctccctagaaaatacaagccctgcccctggagctctcagagcccagcacctggggcaaagtggagaacacaatggcagtgagagttcctttttttcttcttcttttaattaaattgggtttttggggccaggagtggtggctcacacctgtaatcccagcactttgggaggctgaggcgggcagatcacttaaagtcaggagttggagaccagcctggccaagacgatgaaaccctgtctctactaaaaatacaaaaattagccaggcgtggtggtgcatgcctataataccagctactcaggaggctgaggcaggagaatcgattgaaccctgggaggcagaggttgcagtgagccgaggtcattccactgcactccagcctgggtgacagagcagagcaagactgtcaaaaacaaggaaggaaggaagaagggaggggaaggaaagaaggaaggaaagaaagaaagggagggagggaggaaggaaggaagaaagaaagaaaaaaaaactgggcctttggcatcactggaaataaatatccatataacagcggtgtcattttgctctgctgttacaatcactaagcacaaggactacactaggtaatgaacatacaagctagctcaaggaactttaaatttttttgaattataaaaaatttaaagtttattaaaagcgttactaatagagtttcatcttttctgccgcatttgaaataacacaaatgttccccacagcatttgaaataacacaaatgttccatctttgaaaagttgctcaactatcaaagttgaatttcaaagctggtagaacaaggaactggcaaactttgttaacacccgtgccacctggaggtgacactttatggcactaagtaaaatgccccatcattggtcagttagttccattgagaaaaatagccttgaatagttcagatattcagttattgatggtcttcaagaacgcacttctcccctacaatttggcagaagtgtgttgtgctcattgccttcttcataactagagactggtttggttcccaatgcaaccaaatcctcgttattgcttcagctaaattcacacacataaccattttgcaaaactcacccagcctgggcaacatagcaagaccctacctctacaaaaaaaaaaaaaaaaaaaaaaacgcacagaaattaggccgggtgaagtggctcacagttgtaatcccagcactttgggaggccaaggcaacagatcacttgaggtcaggagttcgagaccagcctagccaacatggcaaaaccctttctctactaaaaatataaaaatcagttgggtgtggtggcatgtacctgtaatcccagctactcgggaagctgaggtgaaccagggaggcagaggttgcaatcagccaagatcacaccactgcactctgcacctaggtgacagagtgaattctgtctcaaaaaaaaaaaaaaaaaaagattagccaggcatggtggcaagcacctgtagttccagctgctggacaggcagaggtgggagaatcccttaaacccaggtcaagccatgatcgcaccactgtactccagcctgggagacagagtgagactctgtctcaaaaaaaaaaacaagttattattatttttccattgagttggtcttgttctgctgcccagactggatagagtgcagtggtacaatcatagctcactgcagcctcaacctcctgggctcaagtgatcctcccacctcaacctcctgagtagctgggactacaggtttgcaacaccatgcccagctaattttgttattttattttattttatgtatagacagaggtctcactctgttgcccaggctggtctcgagctcctggcctcaagcaatcctcccatctcggccttccaaagtgctgggactacaggcatgcaccaccatggccggctaatttttgtattttttgtagagatgaggtctctccatgttccccaggctggtctcaaactcctgggctcaagcgatccaccctccgcggcctgcagaagtgccgggattacaggcaagagccaccatccctgactaaaagattttcttttcttttttttttttttttgagaaggagtctcactctttcgctgaggctggcttgcaatggcacgacctcagctcactacaacctctgccttctgagttcaagcgattctcctgcctcagcctcccaagtagctgggattacaggtgagtaccacacctcgctaatttttgtatttttagtagagacggggtttcaccatgttggccaggctggtctcccgacctcagatgatctgcccaccttggcctcccaaagagctggaattacaggggtgagccactgcgcccggccaaattttctttatattaacatgtagtgggattattgttgttcttgaatttgtaaattatttaatagttttccatatctattaaggtaaatatcaatagctgtaacctattcttttttttttttttttttttttttttgagacggagtctcgctctgtcgcccaggctggagtgcagtggtgcgatgtcagctcactgcaagctccgtctcccaggttcatgccattctcctgcctcagcctcccgagtagctgggactacaggcaccagccaccacgcccggctaattttctggtatttttagtagagacggggtttcaccgcgttagccaggatggtctcaatctcctgacctcgtgatccacccgcctcggcctcccaaagtgctgggattacaggcgtgaaccaccgtgcccggccaagattctttataaagcattaattacatggccacctcctttcatcctctaggacctgttaggtcctgtcctgaccacccagctctcgtgggttctcctaattattctcagtctcctgctgatttcctccccagccactacagcagggccataactggtctgttgaccttttctcccctcccctcccctcccctcccctcccctcccctcccttcccctcccttcccttcccttcccctccccttccccagcccttttctttccgagacacagtcttgctgtgtcacccaggctggagtgcagtggcacgatcttggctcactgcaacctcctcccaccaggttcaagcaattcttgtgtctcagccttccaagtagctgggattacaggcgcacaccacaaaacccggcaaattcttgtagttttagtagagacggggttttgccatgttggccaggctggtttggaacttctgacctcaagtgatccaccagcctggggctcccaaagtgctagacttacaggcatgagccaccgcgcccagccatgatgacctattttcaatgtcttccaccaccagcaaccccacaaagacagccccaagagggtaggaaatgctacctggttcatgagacacatgtccctggcacccagccagtactagccctaagcgcctggcacttagtgaaagctcaataaagatatactgaagaaataaaagcaggtagagaaaagaccaccaacttcaacctctccaaagtagatttcttcgagtcatttgatgttcagcagaaaaccgtgttcttttaaaaaaaaattttttttcagcgtttttttcgtgtgtgtgtgtgtgtgtgtgtgtgtgtgtgtgtgtgtgtgctgtttcattctccaggaaaacaatgaaacagtgctaaaatcagcctgtgctagtgtggactgtaaactcctttttaaataagaaagggagatataaatagacctgcaaatatgcctgtattttcaaaaagaattaatgaaaagataaatcaaaaattaatttttaggctgggcgcagtggctcacacctgtaatcctagcactttgggaggctgagacagatggatcacctaagctcaggaattcaagaccagcctgaccaatatggtgaaaccccatctctactaaaaatacaaaaattagccgggcttggtggcatgcgcctgcagtcccagctactcggaaggctgaggcagagaattgcttgaacccgggaggtggaggttgcagtaagccaagatcgtgccactgcactccagcccgggctacagagcgagactcattcttagaaaaaaataataatttttaaaaatggttactttaggctgggcgcggtggctcacgcctgtaatcccagcactttgggaggccaaggcaggtggatcatgaggtcaggagatctagaccatcctggctaatacagtgaaatcccatctctactaaaaatacaaaaaaaattagccggatgtggtggcaggcacctgtagttccacctactcaggaggctgaggcaggagaatggtgtgaacccggaaggtagagcttgcagtgtgctgagatggcgcaactgcactccagcctgggagactgagcgagactccaactcaaaagagaaatctgaaaggttcattgggcagtgataagagcaataacattggcattgtttctgttatatacagtaggttaaagccaggaacccagcttttcagaaaatcaaaaacaaaatcaaagaaaactctaaaacgtgagttggaaatagcagtataattcactgaggtttcctttttgataatatttatttcctttccctacattaaaaaggccaggagcacaaccacccaggtaggactaaatgccccttgcgcccaaactgccctaattaccgcttcccataaaaggaacccaggatccttggataaatgacggttcccaggtgtgggtcagtacaggtgggatttggatcatctccggttttgttttggggtttgtttttagagactgagtctcgctctgtcgctcaggccggagtacagtggtgcgatctcggctcactccaacctctgcctcccgagttcaagcaactgtcctgcctcagcctccctagtagctgggattacaggcacctgccaccacacctggttaatttttgtattttagtagagacggggtttcacagttaatttttgtattttactagagatggggttttaccatgttggccaggctgttctggaacacctgacctcaggtgatccgcccgcctcagcctcccaaagtgctgggattacagacgtgagccaccatgcccagccagaacatgttttaacaaaaagttaagaagccttcagacttttgtcctgcaaacactgggccaacttggaactcccactgaccaaaaacaagagacttgaggcatcaaaatgacgaccacatgctctcaacacatcaagtgtataagacttgtgagctcataccaaaaatgtaaaagcttattcctgggtcacctctggagaatgctggcaccaactcatcctcaaagctggtaatcaagaggaataaaaaacaaacaaaacgagcatttctcctttttttggttgaaactgtgtttcagggtaaccaaataatcataaggaagctcttcttaatagaatttcaattaacagatgtggaattttaagaagtctttaaaagtgacttttgcaacatcaatggcagctaaaatcctaaggaagaaggttggtgggctgggcatggtaggtcacgtctgtaatcccagcactttggggggccgaggcaggcggatcacttgaggtcaggagttcaagaccagcctgaccaacatggtgaaaccctgtctctactaaaaataccaaaattagcgaggcatggtggcacacgcctgtaatcccagatacttgggaagctgcggcaggagaatctcttgaatccaggaggcggaggttgcagcgaggcgagattgcgccagtgcagtccagcctgggcgacagagcaagaccctatctcaaaaaaaaaaaaaaatagaaaaaagaaaaagagtgtggggttttcttgtttttgtttttgagatggagtctcgctctgttgcccaggctggagtgcactggcgcaatctcagctcactgcaacctttgcctcccgggttcaagtgatttctcatgccttagcctcttgagtagctggggccacaggtgtgcaccaccacactcagctaatttttgtatttttagtaaagacggggtttcgccatgttggccaggctggtctcaaactcttggtttcaagtgatccacccgccttggccttccaaagggctgggattacaggcgtgagccacgtgctggccttaaaattgtgtttataagccaggcatgatggctcgatactcgggaggccgagagctggaggatcagttgagcccaggggttcaaggctgcagtgagctgtgattgcaccactgcactccagcctgagtgacagagcaggagcacatctcaaaaaaaaaaaaaagaaagaaaactaaaaagttaaataaaacaaaatcagaaaccagaaacacaataaacactaaaactcaagattgcaaaacaccaaatctatatttacacttccacatataataacataactttaagctgaaatatatcataaataaaacaagtaatgtctactgttcgacaacttaagtatcaacaattaaaataaatcaaactggaatgaaataaatacataaacaaaaatccaacgaattgtacctctattatatgtactgttgtctcaaagaaaaaaaaatataaaaccagtagtataccaatagttaatactgatggacacaaaaacatattttgaagtacaaagggctgtaggaaaataattggtatttttatacattcagaaatgtggttaaaaagagaaatctgaaagcccaaaaaattccagcataatacaaatcgacttgttttcaaatagatttggtgattcttttttttaaatacaggtttaaattccagccctctattatcacataccccctttaagatttatggttctagtcacagcaagctctctgtaacactcattggattaggcaaagattgagtcaatcatcttgcaaatgtgttaatcttcaaaaataggctataaaagtgcaaaactatgaaaacaaaatctagattatgtacatatggctcagcttgtgaacaggaaaaaaggtcaatagtgtacactttcctgatacaaagcacttcattgcaatgccaacagactgatctcaaatgagttctcccttgtaacacaggagctaagacttctatcaaggaggacatcttacgttgcataatttaaaaaaaaaaaattttttctaggattacccttgctctatggagaacagcgaggccagaaaaatgaacagtgcaaatttatttttgaaacagtttcttaataaaatattttgtggtcactaagcccatgtactaataaactcagccatggacagcatattaaagaacaaaagtttaaaatatctaggaagccagctggtggccatcttctctaaaacccaaattgcatgtgcactgagaaaaatgttactgcttcaaaacaaccaaaaatgggaaaataactgaggtctagaaacagattttctctttctagactcccagcgggctcggccagcagttccttattcaaaatcaatgtgtctataatcaactctagtatgtccacagttcacccaaatgccagatacattaagactaccaaatacaaacctaaaatgttccccccaaaatttcccttaaaactgttccccaatacctgcaattcacagatataatttagcatttttgtttttatatactaatttaggcaaaacccccccgccactgaatcgtccaacaaaaatgattaatttgacagaaacaaatttaaataactgcacatacagtttatgtttatacaacgtgtggctgctctacagagaaaatgcttgtctgtagacacactctcttaaaaatcctacaagccatcccaacgccctcagtcaaggatcctggaggttccaggacaatctggagaggcgaggaagaaggtgccttccccatctgagatgctcaaagttgcgataaaatgctgccagcttccgaatggctgacctcgatatctgcagcacatatcatagagggtcaatacttccattaacaattttaagacaacaatagatttgggtggattcaacataatacaaaatcattgacagtttaaaaaaaaaaaaacatacattttaaatgaaagagcacaatagcagaaactgctccaagtgatgagctgcattagagaaaaggaatacacacagtatttgaacaagcaggtttacaacttagatatttacagatttttacctgaggtgcaagcattatatacttttcccccatcccgccccacccaacccaaatgatttcttttcagcagcgctcaagtatgcaaaaattccacttcttatttggtcaattctaagaaaaatattattcagggacaaaatagagatttccagtccccatgtatgtaagttccaactgttccaactagtttgtattgctatttggtacaaaagttaacagaacaactttacacaactgtagtgttccttgcagattcctcatatgttttatgtacagtacaatcacagcttatttcagtagctttcaccattcgcttctcaaaggatgaagtaaaatttaatttcatggggagtaagcactgacatccaccaagacctaaggaaaacaacattttttaaatgattaagatcaaaactgaatacagtttagaaaattctttctttaaaaaagcgtaatacatagaaccaaactgacctagaaatgcaatgggttctatttgttgttgttgtttttgagacagtctcactctgtcgcccaggctggagtgcagcggcacgatcttggctcactgcaacctctacctcccaggttcaagcgattctcctgcctcagccttccaagtagctgggactacaggcatgcaccaccacgcccggctaatttttttgtatttttagtagagaagggtttcaccatgttggccaggctggtcttgaactcctgacttcaagtgatctgcccgccttggcctcccaaagtgctgcgattacaggcatgagccactgcgcctggccctgggttctatttaagttcaacttttgctatgaaagtattaggagaatgactaactagataatgctgcgaactttggagctacttttagtaatttaactgagatgacttaaccaagaatcagaattcagtaaaaggcagttgccatgcacaagaaaatcccagctactcaggaggctgtggtgggaggactgcttgagcccaggagtttgaggctgcagtgagccaagatcgtgccactgcactccagaccctgtctcagacaaacaaaaccaatatgtgagctggtccagaggatgagaaagaagaggctggaaagcaaagacagagcaggcaggatgttctccagatgaaggaaacacaagcagagaagctcagagctcccagagagacaccagctccagatacaggagcatggctgtttgctactactgatcagttgtaatggatgcttcgagtaacctgttactaaaatctgctcctcataattcataaattatttttatgttttaatatagagtggactggatcttattcctgtgatgacaaagctttactccctcatgttcttcatctattatcctaagcaggagaaaagactgcagaaccacacaaggctcacgctgcccagggagaacgtcatctcagttcccatatgagtcccgatgaaaatatgacagagaaattctgtcctggaccacgagcatcttttcatcttcgtatcctagcagccagcaggcacttggtgaagaggctgctcaacgaatatacagtgacggttttacgggacaagagttacctgaggaacaactaaatctgcccgtgagccccaagctttccatttaatcttattgttgaatgagtcatagtataacctgtacacagacatcacaccttctgcccaaactaattaactaaatataaactaacaaaaccaacatgcataattctgatactactacttgagccttacgggacggcggtgcactacagtgagacctttaacatgtgaaccacatgctcacatacttgctcctgtcccagttcccctccttggcagataagtacttatcttggcagataagtacttgccaagtctttgaacaagttcttaaactagaacgttgggcatagagcctggatctttgcagacctaggacaaaaaccaggctcctgcctctcacaggcagagcggggctttgagcaaactgcataatccatgcctcggtctcatctgaaaagcatgcacagtacctcctaatgctgggtcacaaactttttctgtaaagggccagacggtaaatagtttcagctttgcaggccacgtggtctgtcacaactgcccgacattgctgctgcagcaaggaggtagccacagacaatatgtaacagatgggcatgatcatgttccaataaaactttattgatgatgatgcatgaaaagctagtttgctcatcccttacctaagccctctgctgcaacagaattaaatgagatcctgataataaaacacttcattcaatgcctagcacaaagtaaatgctcagtaaattccagtcactatgactgttttcctattatcttcagtaatatccaaagatcctgaggactctaattttaaaacacctaaaaaatcaaaatccaacttaaaagcaattttgttacattatattagacaacttaatggtttatttccgatcaagtaaaatcaatccccgcccccgcccccccttttttttagactgagtctcgctctgtcacccaggctagacctgcagtggcacaatctgctcactgcaacctccgcctcctgggttgttcaagtgattttcctgcttcagcctcctaagtagctgggactacaggcacccgccaccacgcccagctaaatttgtgtatttttagtacagacaggggtttcaccatgttggccaagctggtctcaaatgctcgatctcaggtgatccgcccgccctgacctcccaaatggccaccgcactcagccaatccagtgtttttaattgaaacatatgctcaccttttttccccctaattagtgaatcaagtttttttgtcatttggtcgataatgtgcattcccaataaaattctcatagtttctcttttgtgccatgctgttagataagtgttgatatgacacaggcctttttcctgattgaaaaaaaaaacatatttagagttaaggtcaaacaattaggtaagatgtgtataggtttttagaagtcaattttcaaaatttctgacactgataatgtaatcaacgcctaagtcacacagtcgcatgcaagtgttttcagttacagctgaattgtttttatgacacttgttagcacagaatttggttgatgtcactaacattaaaattgtctgggctgtcactagaaagaattaaaaagccggaaaaaaatgacatcacaaaatacttgaaacgtatatgcatcatgaaccaaactatgtaaaagtgttgttttttgctttttttaaaatcatttaaaaggggatttgccagcataggcaacatggtgagacctcttctctactaaaaataaaaaattagctgggtatggtgacatgcacctttagtcccagctactcgggaggctgagacggaaggatggaaggattgcttgagtcccggaggtcgaggctgcagtgagccgtgattgcccccactgcactccagcctgggcaacagagtgtgaccctgtctcacagaggaggggaaaaaaaaaagaggatctgacttgcaacacacagagccttttccccctttaagtaaagacaaagttttgattcatgtccattttaagcaccatggggggggaaatgaagatttttaaccaaaaggcagtaaaaattactatttcatcacaatttttataaaatctactggagtgtctgaaagcaattgttttttaatttgctatctctactgaaccaatcagcatcaagcaattcttgacagagtgttgtcaccacacagaatcctcagtttgaaactaacacaaactgaaatgtgcaaaactgaatctgtttctttggggagcacaaaccagtagagcttctatgtgataaaggaagatgctgcagtttgaccgagtttgccaaggagaagatgtccctgggacactgagctacttttttacacatacaggtatgtgccagacacctgtacgaagtgacaccaccaggacacatttctatggggaaaaccccagtcatctatgaggttaacaatctacctatgggggaaataaggttggttttaaattaatacagttgtccctcagtatccagagggcactggctccaggaccacccgcccccaccaccccagccaacagataccaaaatccatggatgctcaggtccctaatataaaacagtgtcgtatctgcagtattcatagtatctgtagtactatttttttttttttttgagatggagtctcgctctgtcgcccaggctggagtgcaatggcacaatctcagctcaccgcaacctccacctcccaaggttcaagtgattctcttgcctcagcctctggagtagctgggattacaggcatgcgctaccacacccagctaattttgtatttttagcagagacgaggtttctccattgttggtcaggctgtttcccaaagtcctgggattacaggcgtgagccaccgcaactggccttgtagtactattaatttgcagtattgtagcgtaacctattcacatcctcccatatactttacttacttattatttatttatttatttgagacagagtctcactctttagcccaggctggagtgcaacagtgcaatctagacttactcactgcaatctgcgcatccccggttcaagcgattctcatgcctaagcctcccaaacagttcggattacaggtgcaaaccaacacacccagccaatttttgtatttttagtagagacggggtttcaccatgttgaccagtctggtctccaactcctggcctcaatcgagctgcccgcttcagcctcccaaagtactgggattacagatgtgagccaccacatccagcacctcccatatactttaaatcatctctacactgctgggcatggtggctcatgcttgtaatcccagcgctttgtgaggccaagacaggaggatcacctaaggtcaggagttcgagaccagcctgaccaacatggcgaaatgccgtctctactaaaaatacaaaaattaggctggcgtggcggtgggtgcctgcatccaaactactcgggaggctgaggtaggagaactgcttggacctgggaggcagagattgcagtgagctgagatcacaccattgcactccagcctgggcaacagagcaagactccatctcaaaaaaaaaaaaaatcatctcttcgttatttataatacctaatatgaagtaaatgctatgtaaatagttgttatactgtattatctagggaattacgacaaggaaaagaaaactgcagatgttcagtacagatgcgaccatccatttttcccccaaatattttagtcccgcagttggttgaatccactgaggcagaacccaaggatatggagggctgacaacatttaacagcaaaacggttcacaagactctttaatcggaagttcttttgctttctgctcttgccaggtcaagggtccacgtgtggtccttactgggcgccccctattctgccccgtgtgggaagcatgtgacttgatgctgtacatgtaaaacatggtttctgctcttaagaagtttacaggccagcagggaatggtaaaatgcgtgaggaagaacccctaggctgggcgcggtggctcacacctgtaatcccagtactttgggaggccgaggccagtgcatcacctgaggtcaggagttcaagaccagcctggccaacatgctgaaaccctgtctctactaaaaatacaagaattagccgggcgtggtggcacgtgcctattaccccagctactcaggaggctgaggctggagaattgcttgaacccaggagaaggaggtttcagtgagccgagatcgtgccactgcactcaggctgggcaacaagagcaaaactccgtctcaaaaaaaaaaaaaaaaagaaagaaagaaaaaaaaaacccccgcaactccaggtggattggcactgactactgagcacaccatacatgtgcaaaggaagaaaaagggctgtgatgaagtgaggcaagctggggcctcaactggctgcatctggaatttcaacagcaagacaagaatggactagacagaccagtgttctcacccactgtttccatgatcactctcacaacagaaaaataaaattgacaagaaaaattactcaagaataaggctgggtatggtggctcgcgcctgtaatgctggcattctgggaggccgaggcaggaggatcacttgaggccaggggtttcagaccagcccgggcaacaaagcaaatccctgtctctacaaaaaaataaatttaagttagccaagcgtggtggagtgcatctgtagtctaagatacttgggaggtcaacgcaggaggatcacctcaggccaggagttcaagaccagcctgggcaactccatctctacaaaaaaaatttaaaaatcagctgtgcatggtagcagcacatatagtctcagctacctgggaagctgaggcagaaggatctcttgaactcaggaattcaagactacagtaagctatgattacaccgctgcactccaatctagatgacggagcaagaccctttctctaaaaataaagtaagactaaacaaatcaaaagaataaaatacacagggttaagagttaaacccacagagttaagtaagccttggaggaccacaaaccactgccgtatctaagaatgcttctctctgtgacccccaagaacttctggctgcctaccccccacccttgggagtggtaccatctccactgagaatgcctggattagctattaatcactgtaggcagccatttaaacacgacgcccctcatgcaataccttctaacgtcgagctggatgctggactaccagcaggcacacaagtgtaaagtggcccggagccaccatagggcttctgaacagtcagcacatttggagaatcgacctcgctggagctcaggaaccttggtttgggaggcagcgcctgcgacggatacacacagtcctgcggtaacagtgatgtgatgcctctgaccatatggtacttgggaaggtcatagcctcttctgtaattggccccgggctggtcaacgtcaagggcaaccacgctggacttcagtctttttggaaggggctcaccaaattctgctgcagtattgctggcactccgattacagaaatagtctcttcccggaggtgcccacgggctgtcgttcttggcggggtagtcgatggaaccattgatgttactgctgccgagggtgggctgagaaggagctactggaagaggtttcaattttgtctcgggtctttttgtcttatccggtgcaggggaaacactggttttaggaaacatctcagattgctgttgcctggtggcggccccttggacccccacattctgctgtggtctgtgggacttcaggttacttggggctaaagtgctagagtctatccctgaagtcagaggggccttgcctggcccaggagggctctgcttccccttcgcagatggcagggatttggactgcgccgggaaagcagacttgggcttgggtttacagaaactagagaggggaggcacatcttttcccagcaacgctggcgggcatccggtacgtcgacttctaagcaaggacttgtttcgacagtttttatgaacgtcaggattgtatttatgctccagtctctggtgcatcattaaaacttctggataaaatgtcttgaaggtacaaaatggacaggtgatacttggaatcaaacttttactcaaagaaattgccgggcaattgtgaagagcccccacggataaatttaaaggtttttcgtgacaatccacacttggcctgtatctgcagtcagctgcggtctccgtttgcttctctttggggctaacttcaaggttatgggtggtactgccatccggaggaggagtaacatccgccttggttctacagatgaggttatttgcctgagtttcaactgctgatctcttttttaacaggtccaggtaagcaggggtagggtttttattcactttatcagcactgtcatcagctgcatttttatggaaatcctgagtatctttgtgtgctggtgagaggacagcgctgcccagaacattctgaaaaacagaaggcatctccttaagctgctttgcaggtggactgcctgtaacatctttggcaccatcaaaaaatcttttcaaatttttggtttgcgcactgtcagcggttaatagtgcatcttcagtgtcctgatttttaccatcgttcttgacttcagcagcaacatcggtttgtttttccttgtgatgtctctccaagtgatacctcagagatgtcttctgggctgcagcatattcacaaaattcacatttgtatggtttttcacctaaggcaagaaatggcactttattatagaagtgtatgaaaagcactgaaatagatcaaatatctatttattaagaaaacaggcttctttcctccttttgctttctcgatctactatcacataggatttctcatcagttctttatcatccttactgtaatgaatatttgaaattatgaatgcctatcttcaatagaaaaattaacagcaacacttctaacttatttaatcttcctaacagccctagggaaatatgtattattctacttttacagcaaagaaaactaaaagcacaaaaaggttaaataacttgcccaagggtgcacagatagtaagtggaagagatgaaatttcaaatctacgcagcctcctacatcatgatgtcatagctcctttcacaatctcaagactactaaatagattctcatttcattctcaatcataaagacataagatgcagcattttaaaatactgtagcttttaataagataagagtcaggacatagcagtcataaactaaacaaatgaactttgtccgggcgcggtggctcacgcctgtaatcccagcactatgggaggccaacactatgggaggccaaggtgagcggatcacttgaggtcaggagttcgaaaccagcctggccagcatggtgaaaccccatctctactaaaaatacagaaattagccgggtgtggtggcaggtacctgtaatcccaactactggggaggctgaggcaggagtattgcttgaaccagggaggtggaggctgcagtgagccgaaattgcaccactgcactccagccgaggtgacagagcaagactccgtctcaaaaaacaaaaaagaaagaaaagaaatgaactgcaaataagaacaatggctcaagttacaatggcactaaaagaataaaaataaccactgcaatcaacatgctacatatttatccttaagctagtccaaggatctggcagagtatctgaacaacaacaacaaaaaaattagataactacataatttaactaatgcatggttaaaaaaataaaagttctttacctgtatgcgttctgagatgaatattgaggtaataatttgaacggaaaaactttccacaataactacactctcttgaagatgtaagatgttttatttttcctccatcatcatttttatcttaaaggaaaaacaaaaatatttatataagaaggtagctgaagtacctgaataaggcatgctgacttaaatattcttgacataaacatttttggaaagcatgaaaaaattcttttatataacatcgggttagaacaaaacggctagacacacaccaaatgctgttggaggttgtttgaagttttagagtgttataacatgattttgttttgtttttttctgggtacagcagagtacactattaaacattcagttcttcgtttgccttaatcacaagaaagatcatttcatagactgaattgcccgggcagcttccggttctcagtgtctctgagcaggcaggatctggcaaactgaaggtggacatacatactggcgggaaaaattatcttcttcagaataatttagaaaaatgagccaattacaaaccgtcaacttcccaaccaccaggggaaaaataagccgtttaaggttaggattaaacaactgaccactagagggcagcaagcacaacttaatcttcaacagaaaagaaagtctggcattgggcaagcacctaggaaagtctgtcaaaatttagcaaagttttggaaagcaggctgtattgtccacaaacactcatgtgggcgaaagagatctgacaaatgaaaacctgtccccaaatgacagtgtttggctttagtttctgcaggacaataggacaatgtgtctcacgtgcatcaggagaagttagagtccactggaaggaggacagaacttcaaacacacaccagccctccaaaagacaatcagaggtgctgccgttaaaataccacccccaaaacacatgaatgtttaagttttaaataaatgtcccctcactgtagatcatatcactatccacctgtaagacagacacccttgatgatctatatagtgtctaaagaaagaaaaaaaaatttacttgatcttcttaagtcttaaaaaagccaggatgatagtacaatatgataaatctagactactaagataatataagtttaggaaaatcaattccccaaatacagaatggccagcttttttttcttacaatcatacccaaactagctgggtttataactgggcgttgttgcaatttccgactcccaactatgtgtcaggatttatggtatgttgcgtcatatccaaaaagctatgaaatgccttttctttagaacaaaggacatgacatttccacatctacctggttcctgctctttcaagcatcacctctgactttacagttatattttttaaaggactgtgatctttttacaaataggctgttgaaattgtccttgggaggtggaagacaggggtcaatgaaccattttgcaaacagggaaatagtagcaaagaaaggttaagcaactcataattggtcacaaaacaacgcagtggtagaaccagaactcaacgccaagctggggtgctcccacccacagccaggcattctgtcctgcctgatgatctagcccatgttttccacaccacctaccggtaactggccttttcatttctttcagggaactggggcatctcacagggcccctgcaacagtaccggcactagcagaaaccacttagctaactggagtctgtgtttaaagcctctttttatgatgccattaagacattagatttgtagtatgctaagtgctgggtttcctgtgtcccaggaaactcaaaaacattctaaagatttgatatacagactacagttctcacgtcaatcacatgatcagaaaaggaactggcactggctgaagagcaggtgaaggaagagtccaatcaatcgtgtgggcaaattcatcgtgggtctcatacacccagttttccgaagaattcaagcacacaatcaagtgacactgagaggaggaggcacttgttttaaccgaggaccactttgacagatgcttccctaagaccgattcatgttcccatcattcgcttgtcaattacggcctgcccatcagggtcttttcaactgttttaagcagcaagatcctctattcaaacaaaatactaaactctgataggagaagctctggctacagtgaggatgggcgcaactccaaacacaggtggaatcctttgccctagataacgcccaccagggctcaggaatattatgtgagcatgccttcagtgatcaccttctctttctataaatgccactagtacactgaaaattctgctgagcaaatgagccttcttaaaaatgtcttcagtgtgctcacattccttgtattttatgacaaatcatttgggttcctgaggtacctataaatggatactagcttgccagacagaaaggacaaggttttggacagcaccaaacggctgcccaaataatattcctggctctagttgatcatcactcccagtaccttttatggccactagaaattcactacagaaaaagatcaggaacgccagaaaaacttaagtgaaggctagggtctctcaatgctcaaactattgacatttgggaccagataattctttgatgatggggctgtcctgtgcactgtaccatgctgagcagtgtccctggcctctgcccactggatgccagcaggcacacccacacacacagtatgacaaccaaaatgcctccagacattgccagatactgattgggaacaaaatcgccccagttaagaagcagtgcatttgggctggatgcacaagttattttttttttaaagtgtgttttgtgagcaaaacgatacacgtttaaaaaatatatatatattttcagaacaaggagacctcttaactcaaccctgttattacagaaatgagaaaattaaggccctgagaggttaaatgacttacacagagtgataccaaaaagagcctggacttgactctggctctccaaaccccattcctggccagcgttgtctggagatgggaatagagagggggagacggggagacagacagacacaggcggaacagcacgggacggagacagggcagcttacccagatggattccttcgggaagcccatcctcagatccgtcttcagaaccaccttcccctcgatccacggctccattttcatccagaggggcggcgaggtcaggagaacacgtccccggctgcctcccgtccacagacatggtgggcgactccgcgccggccctccggtccttcttgtggaccctggagtgcaagaccagctggtggtaggttctgaaagctttgccgcactcggagcagtgagtgggcttctccttgctactgggtaacttgggatccgcgtccacggagggcgcttcgccgtgggagtgtttgcacttctctttctcttgcgagaggcctgcacaactgcccttatttgtttctccaagctccttctcggaactcgaatcgtcgttgtcggtgctcccttcttgccccgattccttcacttcttggcaaatggcaacttttcctttggtagccagctgccaagcctggaaggtggtgaacggatcgagctgagggatgcatctgacaggcttcttccccgtttcagggtgagattttggtctcaagttgaacaactgcaggaagtcctccctcgaggacggcattcctccttgtggagagtctgtctgcgcgctgctggtaccgaaagcagtttttttggtgtgcaccttgcggtgctcaattagactttctttatttggaaataggaagccacaaaccatgcagattttgtaaggagaggagatgctctcggccgcgtgcacctggacgacctcgttgatcgttgctggactactctccaagccttgctgcagtttgcttctggcccccgatttgccattatgtgtccgcatgtgatttttaagaaaccaaggctccttgaatcttcttccgcacatgttacacccgtaagtgaaagaatctttgtgtgttctcatgtggatctcaacatcaaaagcgactctaaatgtctgcccacatacctcacagctaaattcattttccttgcaattcttttccttgggaggttctgttcgcacttgacttttatcaagcggactgagatactctgcttcaacccgaagaactgctggttcacagagggtaggccggtgttgcattaagacatgtttattaaggtcttctgaatgtgtgaaggtctggctgcagaacatgcaatccaagggcatatacccctcgatttggatgacatttttttcttgtgtagctcggaatggaacaacagcggtccctttcattgacaaggcatcctccatctccatcggactgccaagagagctgccaatcacttctggcccatccatgtacattaagagggattgagttggcatgtttcctgtcactttcgattgcatataatctcaaagttccgttgggcaatttctggagttggaataaggccacttgtaagacttgtcactcacccctctaacagccctgggttccaaaaaccagagcaaatatttattataaaagttcaaaagaaagtgtatagtcctctaacttcttcgaacttttaggaagctcagtgatggtgtcactggttctttccacaaacaaggcatacagggttcccaatgcctcgattcaaatatgaatcagcacaaagcattagttctctttgtctccattgaatgagtgtttcaattgagcaagaagtcaatcccagcaacctggagacaagggatttccaaaccctagaggaaaaaaaacagaaacggttagctacactcagagcgaagagaaggctggtgtgggtgagtcatacggtcttttccacgcagcagagaaggtacctaattcaattgcttcacttttaactaatatatagggcatcctgttaaacgtgcttgttaattaaatcattggcattttatccagtcagtacacttattaaatcagaatttcatccagttaaaatccagtttaaatcagtgctttaccgacttaaatctaaaatgtcaagttttaggtcagaaattgttaaattcagctgaatacattttaaatgccactaaaatgcacatgtggatgccatcaacagcctccctaaatctaaagactataagaactgtgaaaattaagatgaaaaaattaaaacactttagtaaactattttaaatccagtgtatacaaaacaatttaaaatttgtttcatatacaaacaaatctgcatccaagaaatctaagtgcccaaacacccccttagagattttgcacatacagaggtcaacaaaatgagcacagaaatacagaaacttttcctaaaatccccattcaagaaatacttaacacctcagaatggtcactcatcttggccaggggaaccctgatatattttggttcactggatattcgaaacctcaatccactgttcaaatcccagcttgctttcaacgactttctgccttcaacaagcactgggtggggcttcctagtccaaacaacaaatagggaaagacatacacaaagctcctttgtgaatgtatagatttaaaataaaatcctcaacagggctgtttcaacatggcttagtctttcatcagaaaatgggccctctcatttttttaatctacctttcacatcatgcactggccaggtggaaaattactttatttagctctgctgcttctggtttagaagctaattttcactcctggagaagaattaacttctaaagccaataccctctgcctttatggcaaacattggataggcattgtttttaaatagtcccaactacttaaaacttaagtcagttaattccacccaagaaaaccaaaaggcatgcaaactactcccagcaaagtaaccttaaaaaacaaaagcatactttactttcctccctctctctacttccttaaagagcaaggaaggcctgcaggctcagagaagccaaggaaacatctcctcctttacactccgaaatagaaattctcatactccttgttatctttagttttgaataaactagatctttaacattaagcttttctaaataagactgcagatcaaggattagggtaaaggaaagaatgtcctgaagtcttttctttgttgctatcacaatggaggatcaacacatgggctggtgaccagcttggtgtgatataatagaacactccagagacccgagttctagtcacaaccttcaagttgtcactgccacataccacatctttctattatctatttaacgcagttggttaaactataggatggcctttacagttccaatattctgtggttctggggatagagctacacattgaaaagaatattcaattactctgctaatcagaatgtgaagtgacttaggtttctatacatagaagcttaagtttcatttgcttattcaacaagtatttactgaatgctagcgtcccaggcaaggttttaactgaataacagcacataccctagaaaaacagttatcaaattctgacaacgctgttttccctggccaagaacaaagactcatttatttgaggtccttcctacttttagatgctaaaatacgcttattttttaaaaaatcaaatagtggcaataggcaatagtggagttttttggttttttttttaatgtccttatttagcaaaatcaaagttcagtgagaatttgaaaaaaaaaaaaaaaaaaaaaaactaagttagtccctatgtcagctctcaacattattactgtattttagaaacttgactaatacgtgaaactgtaattttggggaactccacttctctactgacatcctttagaaaaagagacaccagctctacagtctcgggattagaaatatgatgtgaggacgggtatagtggctcacacctatactcccaatgctttgggaagccgaagtgggtggatcacatgaggccaggagttggagaccagcctggccaacatggtgaaaccccttatctgctaaaaatacaaaaattagctgggcatggtaatacacacctgtaatcccagctatttgggaatcacttgaacccaggaggtggaggttgcagtgagccaagatcgcaccactggtccagcctgggcaacagagcaagtctcccctctccgcccaaaaaaataagaaatatgatggagtgttatttcccactcagggaaacagcataacttagttactgaaaatatttattaatagaaagatgttttggttccaattctcaattatctgggttaaagaagttaccatcactctccacacaagaccttgtaggattatttcactgcggtgaaggacaatgaaggaggttcagtgggaaacgatcttaggacagaggaagcttccactttgcctgggagggtgaacagcctgggagacctggagatgagggcaggcattctaggccaaggggtcttcttgtgtggtcagatggggaaggaaaccctcctggcaaaacagcagaattctttctccaggaaagcttctgagactgactctaatagtcaattgtgaccaactgtcctaggctcccagggccacagcaatccttaggcaccccaaatgtgccatccctgactacccagcacaccctacccccccaaagtattgtgacagctcaaggatgacttcctctgaaaacctctgtccagatctaaaaccatcctgtttgtttgcttgtaactgtctttttctaaaagtaacacctcaggatggagactgttgccttgtccactgctgcccccaatgcctggaacaaggtgcctgacacaggattaggcactcgacacatagctggtgaataaatgtcacggaattagcacacgtgtagaatcagtacacacgtttggccacagtcactaaccgtaactgatcagaaattaaaattaacttgcatgttcatcaaaacttctacatggctatcagcgactgccatctaattgccattctgcaacttcaagagtacaatttcaagagcgtaataaaaaaaatcgtatttaatcacaccataaagttgatcagcacaagcaaaaaaaaaactgcactatttggatttatactcactctccttatgaccctccaaaacaaaaatgctgggcatcctagggctatctctgacagcaaatgccttcagctcttgacttagaaactgctaacacactagacaaaacacttccttaaactctaagacaatgaataatactttaaaccaggtttacatcccttaaaaccaatttgctcatcagtaatcgttaaagtggttgtaacaataaagacgttaataacagaatacagcaaaatagaaattctaatctactaacagcaaatcaccgttccaattgaatggggtgtgtgcacaaacacaagccttcccagaagcctccagctctccacactcctgcacacagaaggcagcagtaaaccgatggcactgctgataaagtaaattgtctttcttgacaaagaactggaggagaaaagcaggatattataatccaacactataatctaaatgcttctagcttgcaagaaagtgagcgttatgaacacgctaagcttactgaaaagtacttcacaaaaatgttttccaatgtttaaaaacattttaaaatctttactcaggtaaacgacagaacttaactcatataccccctaacacctaaggcaagtgggctattgagtatagccatattttgaaagaaacttctattgggattatttcagtagatacttttaaaatttaccagagcgtaatctttgaaatccagtaggaaccatattgctagaaaaggctggaatagaagtgtgatgttctttaggtcactaattacacactgatttgtgactaaagctaccatgaattctaccactacctgtagatcttgaaatcagcaaataggacacattctacactgcttaataaaaagcacagtaatctgtgcttaagtacaactaactaggtacaacagccactttgctgacaattactgtaacttgggaatatttttctttacatcctgatgtactcaaactgttaacttttagaaacagcacagcctctgtttcttctgattaacaggttatcttacattgttgatatggaatatgcatctaccataatacagctttgaataaggtattcaaagtcctcaaaaacacagaaaaattatatttatacacaatttgtcatactgctaacaaagctactttttcccaagttactgaggtgtccaaataaggagttattaaaaaattcaacttaaattgctattctctggccaatgcatttgtaccctgaaaactacaaaattatctccaagacctggctagaagtttacattttctctgaaagtttttcctctgtcttttacgcacagtattttttcttaatctgacaagtggagaaaactctgcatagccatctactaacaatcaaaaagctacaggtttttttattttttatttttaatgctctaaattcttcaacactgtttcaaggaaattactaggggtcacacccatgaggctaaatggtcaacccaactttcctaatttagctgtggaaagatgcttccaagttaagcgaaagaaaaagattggaatattcaaagtttaaggttacaacctaaactcttcaacttgggaagcttgtaaaggaaataatttcattttgctgaaattgttcataaattaccaattttaaataggattagagaccaaagtactataaaaatataatcatatagcatatttgagtgtcattaactagaaactgcctgaattcatcttaaatcagttaaggtcagttaagggatcttagtaagaacttaaagtataacatactagttttagtttcaatattaacagatactgtcatctgcaaagtggtttttaaaaacatcctgatctgaaaaaaagttataatataaggaaagtgaatttttaaaaactttaattaagcaagattaagcattgctatccgtttctcctattactactacttaaccagtacaaccttaaatatctgtaaaaatttgacaggcctaactgcaccaaaaaaaaaagatttcagcaaattaattaactgttaataaactgttctatctttacctgcactaactctctgtaatgaaaacactgaacgtgtgtatacacacatctatctatatatatatatatatatatatatatatatacacacacacacacaactatgcccactactagaccactacaccataccacttcttccaatgagcgctctcaattaaacacaattcaagtaacctagttaaatacaagcttaggcaatgccttttaaggcataagatcgttcttctgcaagatttaaatattcccctccccatcctatcttttgctgactacatactaaagttgtatatctggctctttccagtcacctgtttgctttcaaaatcaaggggaaaagtctcctttcaattagtaatacaatcattgttcagtagatttataaactgaagaaaaactctatattgattacaaaagaaacaaaaacacttcagtataactgagatgctttgttatccttatttgatagaggtagaagtaaaagtaactattactcctaacgctgattcaagaaatgtctagagtctacatttccagtccacttaactacattttaaattccaaaggtttccagacacaccagaaaataatggaacaccaatacagaaacactacacgagtctgttaaaaacctagcttctgagtctgggggagcttttctataggaagtacagtcatgtggaggtcagaaacaagttttgtaaagcttaataagaacaaaggctaagtaaggaatccaactaactctctcatacaacttcttcagctgtcttttcaggtttagtaattttatttctcaactttatcataaaattaccaaactgtccccaaatttccagtaactcaattatgctgataccctggacaggaagtaatggagatgttcagaacagtcagtcaacaaatgttcaaatggaaagcattccaacgttaaatataaaagggtaatatgtggcggcagctggctagcgggggcttcccccctatttatctggaagatagatgtgtacaagaattgagcatgtcatcgtgagctgcagattttaggaaagaatggtccctgttcttccacttccttaaagtcagatttctatctctcctcgtggtctaaattcaaaaacctttgccccagataccactgcaaatttgtctgttattactggttggggaaaaataacccagttcaccttactccaaaaacatgagcatttcagaaaagtttttatactgcctctaaaatgaggccattaagtgatattcaataatcaggcttccttcacccgaatttaagaaatttcctgccgtctttgtgtaatacattttttttttcttccatgtgcgtttaaattttaacacccctcccccccgcagaatctggagaagaggtgtgcggatcaagacccccccgcccgccattgtctcaagtttaatttacatgctgtaaccaaacccttccctctttagaatatttaacaagattgagattcctttaattccatgttggtagctgttctgtaaatacctttcaggtttttattttttaacatcccagtaatctaaaaactattctgtttttagatttcaattgtagtaactggatttaaaatcttattacatttattttattagtggaatactcagtttatgcaactgtctcatgtttttcattcctactttctaattctaaggcttgaaaacagccattgctcagtccttcagcttcaccttcccaattcattcattaaacattccgctcagggattaaactgaaatgggaaattaggaaggaacgatttaaaacaaatcatacccagcaacctcaaaatctataacatacaggccatatgggcatacaggagatgggacaatttgaattttttttttaagcaaatggaaacaaagcttcatataaaacataaaaagggtccaatcatttactttcaaatagagtcagctaaaagtagctccttttttaaagtggcatctttcaggcagtcaagagtcattaaaactactccaaagttcttatcaaccaatatcatgtttgtgacaactgtgagaaaagaatgtaattttataaagtgggaaaacagcacatcttttgggacccctgaggctctaatcaggcatctcagaattaagagtgctccagggttgggaaatggctaccctgctgtggcaaaaacatgccatttcataataaatgttgttaagagagaaaaaagtgattagcatgtatctgcaatgaggagatagaaggacttagtcattgccaggccattatattccttaattatttcatcagtttataagtgacttgatgattaagtcttattttcagatttcctccaaaacaagtccactggaaggggattaggggctcctactcctccctgaagttttcctgccaaaaatggaggctcacaaagaaaaatgcaaatctacccccaccttaaaaaagtaaaggcagtcaaagtcaaaaccttcactgctcctccttcctcccctactacctggaaaaaaattttgacctgttaaccaaaatagattcctcagggtaaaggggagaaaagttttctacaaattttttctaagtggtgtattagttcctttttttgagtaagaagtgaaagggaataggaacccaacacaactgctaaacttcgatctcacaagttactaaaaaacagcaaaggtcaaactgcaaagcgttagaaaagtgttgtgaagacaaaaggattaaaagagtgggacactaaagaaaaaagtgtgtgtccttcaccaataaaagtcatatcttgtcctctacttcctccttctgtaggcaaataaagacaattctaaaggactagctttcctcatcacgccaaatcattaaaattccaaacaaacagattattaatcctattctaacaattaaaataaatgatgaatctgccttggaactactgacaactgtattttaaataacttactgcctcttgaatttaaatataaccgattaaaaatggcagcaacatcagggttaagaaacaaaacgaaacactattagtctccagaaccctgaacaaaacaatatctaaaataaatatgacttcccagaaggaaaaaagttatctaccattaaggacacaccttaaaagttcttagcacacattaagtaagcacaaactagtggcttgcctgttatattttcagacaaaaagcaatgaggttattcctctgcacttgtcactgcagacacatcaaggcttttagaaactacatctattactcgttgtctaagtatcataaaacttagcattttaagtcttgtttgatatcaatcaagaaagaacatccacttcaggggaaagaagtacagtaaaataagaacattgtaaatctccttcttgacatatacaaaagagaaggtaaaaggcctcctaagacccctacctagtggccaggcctggacggcagctgttgctacctcgccttttcttttgttgagcttaatctcatgtcaagtcattcaaccaactcaaaagcaatgaagacataattgaatcaacctgaactaaatcagacctaggcttcttaaaacatacagcttaatgcttccaaacgatctagaaaactgaaaaacctagctacgctgtaggacacacagtggccaataatacaggacccccaaactggccagtggaccactgcaaccgccatttactttctccgtgtttaggaatgttcaacgctccaagccccatagactgattcaggaagataaactgaggctcaaggaatttcgaggtagaacaatacaccaaagccttaaacctgaaatgactacccttttctggggggtggggggaaagaaaaagaaaaaaaagtttctggggctctcagggcggcccagatgccagggtcccagaagtggccttttctagctcctgtaactaaacctggcggaaaactccctgcctgctcaccccacccccacccgcccaagaaagcgccttcccgtcttcggtggccctacccagaatcccaaaatgtgggttccaacccgggccctgaacatcttctcaaactcccgggacccaggttccggcgcgcgccccgcgtgccgggtcttgcccctcgggcgggaccgcccaggcagccccaaatccagcctcccgggcccccagcagcgccctccgcctctccaccatcccgtccggctcgcagtcggggccaaatcgagagacaagagggctgtgcctgaaactgagcggtttcaccactcggcacctcctggcagaaacttcccttaaaaaaaaaaaaaaagaaaagaaaaaaaaaagcagcagcacttttgggctagcatttcaatccttcctgccctttagagttcccagttctgcttccagctggctttgggtgttccactagaattgagttgtaaagatattctttaagtgtttatagaacattaagacttaaaaaaatctttaaaattagaggagggaaaaaaaaagccaccttatcgcacacatccaggaaacgcagccccgtgcatccctgttcagggatgagcaggcgccccaagactcccggggacagatttttgggcacccgagggagtcacggggcgcgcgtcggggtccgcggcgaggcccagcccctcccgcggtcccttagaggcgccctccgcccggcccgagtggaccgtcccggccattgtttacggggggatgcccgtccggacgcattgttttggccgcttccaacttgccccggcccttccccgggcatcgcggggggaccctacgccgacgttccccctccgcccgcgccccaagggccaactgggcaaattgggagacccgccccgcggggcgacccaacttttcggaacagccccccaccgcccacccccgcagacccccgctcccggcggagattcagggaaccccgcaccccaagcccctctgaatcgtgcggcgtgagtgtgacggccaagagcggatgcagcccgggatcgcccgcaccttcccgcgggcggaagcgcaggagccggctggggagggggcgccctagaggagcggatagaaagctgagacggggaactgaggtcatcctggggggggacaagacaacgagagccgggcgcctcgggggcggcgcgggagcctccgcaggaccgggcgggcgccccggctggcgcgggcggggggcgcgccccctttacctgcggctccggctcctcggccatttcctcgcgcggcggcggccgggactgagctgacaccactcgggccggccgggtttgaatgaggaggagcgggcgcggaggggagggggcggggagggcggagggagggagggaggcgtcgcggagtttctctcagccttttgtgcggacacctcccggattccgcgcccgcacccggccccccaaaagacacggggagccgcgggcgaggggtgcagccatccgccgaggagcctagtgccttcgcgcctccaagacccccccccaacaaaaaaggagcgtcccccacccccacccccgcccggagaatataggggccgggctcacctcgggcgcggggctaaggtgagcggggcgggggtgcgcacgggggcaaaggcgcgggcgccccctactcgtccgcgcggggacagtgcaggcgcggggggtccctagagccgccggggcgcggcgcgtccggcgctgggggactgttgggtcagaaagtgttcagggagcagctgttgcgccctccctcggccccgccgctcggagacgccccgccccctgccttcaccggccgccccgccccctgccttcaccggccgcccggccacgccccacaccgccccggccccgccccagcgcccacgtgactagcataggcgcgcccctgctccgccccccgccgccgactccgcctccgggacgggagcgagcggcgagcgcgcgcactcccagttctcgctcggcgactcccgcgcacgcgcgcgccgtgccaccctccccgcgccccccgccccgcacccctcctcccgccatccggcttaacgtggcgggcgcgcgccgcggcggtagccgtgacaggtacccggggaggccggagggagggggccgcgagggtgtgcgcaggcgcagatccggccctgtccccgccgccccctcctctgcaaggtgtgcgcgggcgaggggaggggcccgcggcccgaacccctgggtcaccccgaattacaaacaaaaaccttaacgccgttgctcgcgggttagaaggcagctgtgcgcgaaaaacaccaaagattttcttcaagcttgaggaaggtcgagaagataaacagtttttaaatgagtatcttcagaaagctatttaattgttgtgatttttttttttctgaaagggctgggcttgcgctattctaacttgagatttctaaacttagcctaggttccaagaatctacttggttttgatagaaatccatttggaggaaaccggggacaaaaaaagggacaaaaaaaaaaaaaaaaaaaccgctaccctttcccctcctccctacgcacaactcatttaaagcgtttcccaaatgttttctttccttactgaaaaaaaggacaaaaaaaagatcctgattcctaaggcctgtgatatttccccattttaaataagcttcgaggaaccatagacataacaagcacatccacaatttttctaccccaaaatgcaaactaatgcaaatgtgaaatggatctatgcaagtcgctactaacaaaatagccaaatatttgtgtttttaccggccttcagcatatccaaaatgaaaaaactttaaaacacatcaagaaaagcatttaaaatatctatttcctaaatcaaaagaaagaacgcactacagaaacgatccggagctggtgagcaatgcaatcttaataaataggaaaaggaatttgagaagacagctcagcaaaggggaagaatttgccaagtgtcatgttttgctgtcattttatatataactactaaccccacatatggtctggttagtcttttttaaaaaggaagcgaatcaattactcacaattaattagcagtgccagtagattcttaggccagcactaaaaaactaaattgggtgaattttttttcactcaagtccactgatattgatcacttttagtattaggattccttttctgacaaaggatgaatacctatctttaaaatatattttttaaacttattgtcacattctaaaacacagtccaaaaacacttcataaacaagaaacttcatttaactttatgaaaacaaatgactatgagccttgctacacaacaaagaaactatgaccaagtggaaccaggttgagcctgaagtgtaacctcattctacatgttaatggataacctttgaactccgagaccttgaatgctgtaaacacaatagcactgatagttaaaaattctagtgtcaaaatcgagcaaaaagaaaagtccaaacttttcagggggaatagggaaacaatcaaatattttgacaaataatcgtttcagtaagaacaaggagattcctggctctcagaccttgttgctactgaattattttctgagcaaaaacggttgtgcttgttttccccctgtgccctccaaagctaccactttgttcacattatagcatcatgatttgttactgtttcgccgcctctctcaaaaaaaaaaaagagagcgccttattatgttgtagcttttaaaactgaaagatgattataattcactgatctgtctgctaagagttttatttatatgtgatcctccttatgtttgagcaaagaattacaaagaaccttgtcctggagtcgtgccaacgaaactgggaaatcgttgcaaaattctgccagtgactgactgctgggttgcaaatacatactgtgttttcagaaggacatagagggatctgaattcgcctgggagggcttttccctaagacacattcttcccttagaatgtgagactcatacttcccatttatttggaaagcatgtatagttcaaacaattaaaatatggaaactccaaaagtaacaggagaacactggaagcatttggttttgtaataaaagctaggaactcatactgcacaaagtgaaaattgaaaatcgaacgttggtcttcctatgcttagctccacccacaagaaatccagcttcgccatcactccctgcgtaggccatctctaaaggagtcaggtgctactagatgccagcaaaaaaacaaagaatggaaccaaaagagaagctctgcacatggtacttggagaaggggcagaaaatccccacttcaccttctttcaatgcagcaaacatcagctacacctcatttttcacaatcatccaaacaggccctccttaagacatatttcctagtatgcgcttataaaatcacaccattatctctaatttaatcctagtgatataaggcctcttcgtttagccaacatctgattttctatccagatcctgccagtcacagcatgctcagatctagtaacataacaaaaaaaaaaaaagaaaaaaaaaaaaaaaacttctgatttgctgtatttaacacttactggaatcctcttttgagactcagccttaattagaagaacagaatgaggtaggatcttcttatttcacaagacgttattttactgtggaactattatagaaaaactatttggaaactgtgtgtaaatccctggagctgaaacagagccaacatagatacgggacgtaaaagaattcagtgttcagagcaggaaaacctgaaaaactgcagtgaggagttagcaggaaaagaacatgaaaaagttaggcaaacctgccagcatctgcaaactacaaaggacatttgagaaggaaacagggacagccctttgaacaagactaaatgcactcaagtaagtaggaataacaaacagctcgaaggagcaccacattgctcttttctattaagtttcttgatcccatgcaagtcactcttctgtaaagtatcacaataatatactattaaaaaaatatatttatatatatgtatatatatatatagcagaacttacctttcagaagagaaggcagggtctggaacctgataactctgtaggacttcactctacctggctccaaacaatactggaagagatgtgattgcgggtttttataagcacagcaaaaagggaggggtcaagaataagacttaatttaaataaaggtttcagtaccctcccaacttgattggattagtcaatcttgataaggttgacagcattttttaactggatttgtcctattcgatgagtgccctcccccactgcaaacacaactcatgactcctctaatattctggatagttttctgaaattaccttcactcaaaatgttaatgtaaaaactcccttaaaaattgcacacaaaacacaacactgggaacgcctctttaaagttttctgccttcattagatattccaaacaggaagttttggaatgagggacggaggggaagaagagggtgactaacattaattgaaattcaatcatcattataatctcaagccagaatcttaaaatctaatcaggatatttcatctccatctactccaccctacacagaccttgcatccatcagcaaaccttcatatgtctcaattgtgtccatttatctttatctctaacaaaagcctacaccaggtaccactggcaggtgccatgcacgtgaacgcggagtctgctgttggaaatgtgttgggaagggagagttcccggtaagaattatgtatttaggagctttccaaatactgatggcatgttgagccatcagactggataaaatcacacgaaagaggtgctagtattgggcccttgggtggttcagcgcctggaagtcaaggagaagagaaagagagcaaaggggactgagagggagcaggcagtgaggtctgagggaccgcaggagagcatggggacccaaatgcaagggaagaaagggtgtcagctccatcacgtgttctcctccagacagagacagtactgtatatgcaggtttctccaaacttcttcctttctaggtttcccttaatgctttctctacctataatccaagacttttacccaaaaagacttttaccacggatatcagataaattcaccaccccttaatggcttcctattgccttgagggaaaaaaaactccacagcttcccccaccagctctgcagatctggtccctgcctaactccagcctcaagtcctggcaagcccttcactgaggcatctgaactccagccttctctctgacctagagccttcagccctggggttccccttgcctagcacctcctttctcattctcttcaagaacttggcttctgttctgagagtggtttaaaacccctagttccctgggagggggaggaggggggaggctctgacatagtgtcctggtcatgaacatcttctctccaataacttgggctcagatactcagattctacctctggagagctgcataaccctagaatattatttaatctctctcaggtttcagtttccttatctataaaaggggaatgatgaagatgatgaagacgacaattataataattgtttgtgttacttatataagtaatagtcacatttcttcaagactctggagaatgaaatgagacacactacaaagcttgtgagcctagagttttgggggccctggcactgttctaggcatgggagatagaacattaagcaaaacaaacgaattccttgtcccattggggcttatcttcttgagggaagcagacaacacactggtagttatatttacaacctactgggactgggtcataggagaggggaaaagcctgctgttatagattgaggctccctgaggagcagagacctcccaggaagtcaggtggcaaatcataccgggatggggaggagtgttccattcattcagagggaacagaaggtgagaaggaccaaagaggaagagagccaagcttggagaaagaattggaaggcagccagtgtgtctgggggccatggaatgaagacaggatagggacagaggagcaagaaatcaaggcaggcccgtgtgaagaccggggatttgactctcgttgcagcaggatatcagtgatcagttctctgttccctagtatttgccaaatctgcaacacttgatagagctctttcctgccttgcagttgggtccccatgctatcctgatctccgtcagtcctcgctggctgctccctcccagtccccttggctccttctttagactctcttctttgacttccaggtgctgacatgcccagggcccaatgctagcaacactttcttattcatgtgattttatccagtccgaagcttcagcatgccatcaatatttggaaagctcctaaatgtccatatttcccacctggaactctcccctcaactcccaaaacacatttccaactgctgattttgtctctacatgagaggtccctgtgtttacagggcagaaatgtagaccgtcccattctaagcggccacaattgaccttttcaaaagtcgtcgtctggttatgtcatggccctcatgcgtcttagaataaaaacaaattcccgataacacagccctcatgcatcttagaataaaaacaaagttcccggctgggcgagatggcttgtgagatggctcatgtctgtaattcataattccagcattttgagagtgagagttgggaggactgattgagtccaggtgtttgagaccagcccgggcaacatagcgagaccccatgtctacaaaaaaataaaaaattagccgttgtgtgcctatactcccagctactcaggaggatgaggtgggaggatcacttgagccagggaggttgaggctgcaataagccgagattgtgccactgtactcagcctgggcaacagagtaagatcctgtctcagaaaacaacaactaaacaaaaaaaaaacaacaacaacaaaacaaaacaaaagtcctgagaacatggctgtcaagatctggtgggccatgctaagactctgggatttattccaagagcactgggaagccactaaaggaaatggaaataaaaccaaaagaaccattgaacgtcaagtaactgtttctttcccaagagatgttaatgtctcccaaaagaccccatcctggtttaacaaagaggatatgacaaactgtaagaagttggagtcctgctgggtgtggtggctcacgcctgtaatcccagcactttgggaggccgaggtgggtggatcacgaggtcagcagttcgagaccagcctgaccaacatggtgaaaccctgtctctactaaaaacacaaagggaggcagaggttgcagtgagctgaaattgcgccactgcactccagcctgggtgacagagtgacaccctgtctcaaaaaaaaaaaaagagagagaaaagagaaaactaaggctcaggatcattcagtaacctgcctgaggtcacacagctaacaatttgtttccctactttcccgactacaatgaagccaatgcactagttgaacccaaggtcagactccccctttatcaccaacctaaatttcctcaattctaaaaattggcactgatgcatatttcttgaccccctatttccaggatgtttaccagtcagtcatgtgtggctctggggcaaggttgaaacgtccgcacccactgtcctcccttccccacattctggaacagcaatacagtgtttcacttggttgcctgagggctagtttcctcccacctgtgtcactcccttgagttcttggtatacctgtattcaggaccctctttttcaccagactgtaacagactgtaaatcttttttgtttgtttttttttttttttttttttgagacggagtttcgctcttattgcccaggctggagtgcaatgatgcaacctcggctcactgcagcctccacctcccgggttcaagcaattctcctgcctcagcctcctgagtagctgggattacaggcgcccgccaacatgccctgctaattttttgtatttttagtagaaacagggtttcaccatgttggccgggctggtctcaaactcctaacctcaggtgatccgcccgccttggcctcccaaaatgctgggattataggcgtgagccaccacgcccagctgaaatctcttttgaaagggaaaccgggcacggtggctcatgcctataatcccagcactttgggaggccaaggcgctaacctaaacccaagagttcaagaccagcctgggcaatatggcgaaaccctgtctctatgaaaaatataaaaattagctgggcatagggctgggcacggtggctcacgcctgtaatcccagcactttggaggccgaggcaggtggatcaggaggtcaggagttcgagaccatcctggctaacatggtgaaaccttgtctctactaaaaatacaaaaaaaattagccaggcgtggtggcgggcacctgtagtcccagctactcaggaggttgaggcaggagaatggcatgaaccagggagcggaggctgcagtgagccgagattgcaccactgcactccagcctgggggacggagcgagactgtctcaaaaaaaaaaaaaaaaattagctgggcatggtggttggcacccatggttccatctactcaggaggctgagatggaaggatctcttgatcccagggaggtcaaggctgcagtgagccgagatggcatcaccatactccagcctgggccacacaccctgtctcaaaataaaaagaaagtggggaagaaaatgtaatacaaattaatataccaacagcaattagtgagtactttttccatggagctgggagagagaatgtttgtaaaattaaaatgttctacgctagaaatcaactttccttctatgccttctttatttcaccccttatagctagttaataaatctcacaaatcctatccttctaatctctctgaaatgtatgtaccctttcctttctattctcaccacccatgtttctttgtttccttctagcctgtgtaataatctcataatcgcatctcctgtacctgccttctttctagtccagaatactttttcctaaattccgctaataaccatcctgctactgctttgtgtgaaattctccaaaaaaaattttacttttccaaaataagtcaagctccctctcttaggatgcaaaaccacaccatggtcccagccaatctttcagcctgattcactcagtatatatttattgacctctccttcctcccaagcacttggctagatagtaattaaagagtgaggcacaaaacaaattggattcctcccctcatggagcttatattttaacaggaaacatagacattgaataaattaaaacaaaaaaagacaagaatataattacagtatctatcctagagaaatacactcatgcagaaagcatacacaaggatgcagcactgtttccagtagtgaaaagctagaaacaacctacatgttcaccaaaagaaaatggccacaaaaactataccatatccaaattatccaaattttaaaatatagacaacaggccgggcgcggtggctcacacctgtaatcccagcactttgggaagccgaggtgggcggatcacgaggtcaggagttcaagaccagcctggccaacatggtgaaaccccgtctcctctaaaaatacaaaaaaatcagctgggcacagtggcaggcgcctgtaatcccagctactgaggagactgaggcagaagaatcgcttgaacccgggaggcagaggttgcagtgagccaagatcgcgccactgcactctagcctgggtgacagagcaagactccatctcagaaaaaaaaaaaatagaatatagacaacaggccgggtgcagtggctcatgcctgtaatcccagcactttgggaggcagaggtggtctgatcacctcaggtcaggcgttcgagaccagcctggccaacatggcgaaaccccatctctactaaaaatacaaaaattagccgggcgtagtggcgtgcgcctgtaatcccagctacttgggaggctgaggcaggagaatcacttgaacccagcaggcagaggttgcagtgagccgagatcatgccactgggcaacagagcgagactccctctcagaaaaaatacacactgtgaataaaatgtttactagttccatatcctgcttttggataaacatttgatacaccattctatacttactcctctctttgctctattctgactgcctgcacccctctccgccacccaatcccccaacatatatgccatatatataaacatcaacctgtaaccaccctaatcagccccaaggtcactcgaaatgccacctccttcagttactctctcctttgttcaatgcctcctttatgacactgtctgcgttatgcctagccctgggtatgttatttctcttactacctgaataggggggaggctcttccaagggaagaccagtttcctccatgttgtggaacggtcaacacacaggaggtgctccaatatttagctgttccgctgttctgtgctccttggatttttttttttttttttgagacaatgtctcactctgtcacccaggctggagtgcagtggcgcgatctcagctcactgcaacctctggggttcaagcgattctcctgcctgagcctcttgagtagctggaattacaggcgtgcaccaccacacctggctgatttttgaatttttagtagagaggcagtttcaccatgttggtctccaactcctgacctcaagtgatctgcccgcctcccaaagtgctgagattgattacaggtgtgagccactgctcctggcctccctggattctttttttttttttttttgagaaggtgtttccctcttgttgcccaggctggagtgcaatggcgcaatctcagctcactgcgacgtctgcctccccagttcaagcgattctcctgcctcagcctcactagtagctaggattacaggcgcctgccaccacacccagctgattttttgtatttttagtagagacggggtttcactatgttggccaggctgggctcgaactcctaacctcaggcgatgcacccgcctcagcctcccaaagtgctaggattacaggcatgacacacctcgcccggctcctggattctttaatacactcgtttttttcctatctcacgtgacatgtacatattaagcacccactatgtaccaggcattgttctaggtgctggagatgccgcagggaaccaaacagatcaaaatgcctatcctcatggagttaacatttgatattatagtgtgttagatattaaaataagtactatggagagaaatacaaggggcaaaggggctacagagtggaggggtggtgagggaaatgttaaatagattggccctgaaaggcttcatcatagacacatctaaataaagatctgaagggggtgacagtgggagccacaaggagttctaggggaagagcattccaggttcagggacaggcaagcgaagtccttgaagcaaagtgcacccagtgtttcaaagaacagcaaggaggccagcatggcattgtggctggcgtggcgacaagcccggaaattaggatggggatggtgcatcttgattgcacggatctttctggccatggtaaagattttgaatttcattctgaatgggcctgagagctctgaataatctgagcaaaatggccgggctcggttagtaagtggcgtattcaacgggttcacaccatcaggagcgctcctaaaatagtaacacagggtctctctcctttgctgaaatcactcagatatttaaatgtatctctatttcaggttacttctacaaccataacagtaataataataatagtaagaagaggactgagtgcagtggctggctcacgcttgtaatcccagcaccttgggaggccaaggccggcggattgcttgagtccaggagttcgagaccagcctggacaacatggcgaaaccctgtctctacaaaatacaaaaattattacaaaattagccaggagtggtggcaggcacctgtaatcccagctactcaagagtctgaggcaggagatcacttgaacccaggaggcagaggttgcagtgagccaagatcatgccattgcactccagcctgggcaaaaagagtgaaactgtcttaaataaaataaaataaaaatgtgccgggcttggtggcacgcgcctataatcccagctactcaggaggctgagacgggaagataatttgagcccaagaggtcgaggctgcagtgagcagtgttcatgccgctgcactccagcctggccgacagtctcaaaaaataaaataaataaataaaataagaaaaacagggaggagaacaggagggataagaaggggaaaaacaggccggcctcggtgggaagccagcactttgggaggcagaggcaggaggatcacgtgaggtcaggaattccagactagcctggccaacatggtgaaaccctgtctctactaaaagtacaaaaattagccgggcatggtggtacatgtctgtaatcccagctacttgggagactaaggcaggagaatcgcttgaaccccggaggcggaagttgcagtaagcagagatggagccactgcactccagcctgggcaacagagactctgcctcaaaataataataataataaaaggggaaaaacaaaatgatttactgcacccccactacgtgccactctcagctccaaagctgatttatattatggtgttacttagttctcctgataaccttcatgcttaaatccatttgcagatgaggaaactggggcctgaggttaactttctgacttaattctcttacttgaagatctacaactagaagaaagtgggattctagcccagatccaatgccaaaagccatgctgactcataccattcttttctgtcctaagtggttgaccttggccttaggaaaacagaataataataaggatcactgattgggcattgactctgggtcaagcacaccatcctccattttgagatcccccagcagagttggaatccaagtctcccagagtacaaagtggcaccctaggagcagtgaccacccccccccacagcaggtcagggctgagctcttgaaaatggctctctgggttcaaaccaaaactcgattccccagctgtgccgctttggggcttcctttgaactctctttgactccattttccccattttacagatggggataatagaactccctaacggccgggcgcagtggctccagtttgtaatcccagcactttgggaggccgaggtgggcaggtcgcttgagctcaggagttcaaggccaatctgggcagcatagcgagacccctcttcactgtctctacaaaaaatacaaaaatgagccaggcatggtggctgaagcctgtaatcctagcactttgggagcctgaggcaggaggattgcttgagtccaggagttcaagaccagccctggcaacatagcgagacccctatctcaatttatttaaaaaaaataaataaataaaaaataaaaattaataggctgggcacggtggctcacgcctgtaatcccagcactttgggagtctgaggcgggcggatcacgaggtcaggagattgagaccatcctggctaacacagtgaaaccctgcctgtactaaaaatacaaaaagttagccgggtgcggtggcacgcacctgtagtcccagctactcaggaggctgaggcaggagaatcgcctgaacccgggaggcggaggttgcagtgagctgagatcgcgccactgaactccagcctgggcaacagagcgagactctgtctcaaaaaaaaaaaaaaaaaaatatatatatatatatatatatgccaggcacggtggctcacgcctgtaatcccagcactttgggagaccaacgtgggcggatcacatgaggtcaggatttcgagcccagcctggccaacatggtgaaaccctgtctctactaaaaatacaaaaattatttttttgtatttgagacttcatgtcaaaaaataaaattaaattaaaaaatagccgggtgcagtggctcacgcctgtaatcccagcactttgggaggctgaggcagacggggcggatcacctgaggtcaggagaaaccccctctctactaaaaatacaaaaaattacccaggtgctgcggcgtgtgcctgtaatcccagctactcgggaggctgaggtaggagaatcgcttgaacccgggaagtggaggctgcagtgagccgagatggcgccactgcactgcagcctgggctacagagcaagactccgtccgtctcaataaataattaattaattaattaaaatataaaaataaaatttaaaaaatagtactcgctgacaagtgaatttgggaggaataagcaagacctcactcgtggtaacgggcgcggggtgggggaagtcggggggtggcacacagcgctcagttaagtcacgccattatgatcacgaccaccgcccgcggccgcagaacctgcccgctctgcacaccagggcggacacccacagacgcgtccttcacccgcgcagggacctgccaggggcgcttataccggagggtgttcagagcaggaaaggaagagatcaaatctgaacccggatccgtctcctacagaacctgagtcgctcaatcatcagctagatcgccccgtgtagacaaagcaagtggaattatttgaagagtataccttgagctgggcaatcctcatagaaggtcggggacgacctgcccttcagtgttcctggagcatcttctccaaagtggaggtcgagccaggcctaggaggaaagagagggcaactgcggacgaccccaccgcagaagaggtgaaaccgacgggctccaggtaggtgtgtcctccccaaccacaccctcccacagggcccggagactggggaaggccggagatgagattagggtcagagccacacccctgacccgcgtacaggacaaactgaagccacgcgtctacactggcgctccgaactgcgttggcccaaagcttcttcaccgcttccagcggagggcttaaagcggtccccccagccctcacacagcgggttttctcagaacccagtctccagagaccgcctggattcaaatcctgccgccgccctcagccgctgggagagccgggccttggcctcaccttcttcccagcctcacctgcagaatgggcgtgtcccgagggttaaatgccctcatcaccatgaagccttaaaacggtgcctggcacatggcgatacgcaataaacgtccgccaaaatgacgttagccaggattcgccccggaaggcttcctgttctcatacagcccttcaatgagggctaatccctttggctcctttaacaactttttttttaatgtggttagcacattttgttgacttttttttttttacaaagaccaagtcagcatgtcctcttaaaaatatcttaagagattatgttttgttcctacttgctttgaggaatgacttcgtcctggttgagtggggtgaaaacagtgaaatgcgaacaaggataataagaccatctttcctgtactgtttcttaaaaaaggaggggagtgaggaattaaaaattcagatgctggattttaaagactgtcatgctaagtattttcttatcaacttcctttttttttttttgtcctcatataaacataacagtagttgagtttttcctttcttcttgactcaaaaaaaaaactgacacataaacttctccaaaccaatacagctgaactttctacaaagatttgtaactgatatattccttaaagaaaataagaatgctctgaacagaaataaacagtttctgcagcagttttatttgaagcccacaaataaaaacagcatgtccccaaggaaacaaaatagaattgggagtcgcagctaaaatggctctgccctaatcctctcttacccagtactatggggtttgtttacaggaaacccttgccacgagaagttttctgctagttttcaaccgtattttggcatcatcaactcaggcatatggaaacaaattaaatattcagcttaaaaaaaaattacaaagtaaaggaagagaacgctgacctgttcctttctaccttcttcaggatgggtagaggcatgaagaaatgcaggctcccctccccctccgggccacgcttcccggctgggtggaaactatctcattaccacattttcaacaagtagaccagtttcctcctttaatcaaagttactttgtggttgtttggcagtctgcgcatgccatgtttttatagctatagaaaatgcgtatttatttattttgagatgactatgaccatatgacaaacctaagtcagcctcttatagccaatgatttataagagctctgaaaagcccggcctttaaacattttaatagaggctctctcatcctttgtaagtggaagtgtaaattggtacagtccttttgtaaacaactcaatgagacaagtcaagggccttacaaatgttcatacatttggatgcagcaataacactcctggaatcaatcctaaggaaacagccctaatgtaggaaaaggtgttaggaacaaagatcttcgtggtaacaagatttactacgagggggagagcaatacacgttcactctccatgcatgtgtggagggacacaaataaaggagtggttagtcatccaagttatgtatccccacacgattacatacagccattttagaattagaaagctttgaaaaataggccattgggaaatatttataatagcaaatgaaaaaaccgagatgcaaagttgtatttttaatgaactctaattttttctattagtaacgaaaaaaggatgtaatatacataaaaatatttaaattgattttatcagaaaaattttagtacagactgaatattatatgaaaacaaaaaaattttatttcattagctgtaataatggcacggattattacagaatatgcattatatatatatttaaagatgtatactgaaggatatagaagaatgacatgacataggagaatttataatactttagtaaataaaaaaacaagagaattgaaccaaaggtggttaacatcttgaaactagaacttgcccaggcaccgtggttcacgcctgtaatcccagcactttgggaggccgaggcaggtagatcatgaggccaggagatcaagaccatcctggctaacacggtgaaaccccgtctctactaaaaatacaaaaaattagccgggcgtggtggtgggtgcctgtagtcccagctatttaggaggctgaggcaggagaatggtgtgaacccgggaggcagagattgcagtgagctgagatcgtgccactgcactccagcctgggcgacagagcgagactccatctcaaaaaaaaaaaaaagaaaaagaaaaagaaactagaactgggcatcagatatgggggttactcattacactatttttattattctctctactttcgcatacatttcaaaatttttattaaaattgtttctttttttctttttttacccttaatcctatgatgggttatatttaaaaatttttttaatgtttgtttttcaataatggcatatgtatgaccctttttctactttctatttttctctaattatttttcataatctacttatattacctttgaaataaattaacatttattttaccaaaaagtaatttaaaataagaatagtaaacagttccacagaaaagtttttcttgccatgtaattctagtgaatcctcagaatgctatgataagcctgtgtaccttaaaatgtgagcttctaaatggtccaaatcttttgggacggcaccgtgccatctgagactgctgtaaatatgatcagctgataaaaggccagctgcaactaaccattttaaagattaggaaccatttaaaaacacacacacacacacacacaccacctctggcctcttaagtgttaagtggcaagatactctggtttatttctaaagtttcatgcaataatcacgtaagcaccgagcaggacagaattctacataccgccaagctgactcagaaagaagggttccacattccttaattagcagcatgagaaaagcaccacttcctgcggtggagttcccatttcatccagccactccactggctcggtacatcctcaagtccacgaaaaagattttcataaagtctggagacacagtgttgtttaatttatttcattttactttgttttgttttatcctactttattctattatactctatcctattatatgtattctaatttttacaaattgaagatgtttgtaatgacgtagattctttgtttctagactttatggatgcctgtatatactgaaatcacagttggaggcagagtaggtgaacacttgaccaacttgaaaatacagcttctactttgggaggccaaggtgggaggatcacttgagcccaggagtttgagaccagcctgaacaacatagtgagacccccccatctctatttttaatctttctttttttttttttttttaagacagaatctcactctgtcacccaggctacagtgcagtggcatgatctcggctcactgcagtctccctgtcccgggttcaagcaattctcatgtctcagcctcccgagtagctgggactacaggcatgcaccaccatgctcggctaatttttgtatttttagtagagatgaggtttcaccatgttagccaggctgttctcaaactcctgacctcaagtgatctgcccacgtaaaactcccaaattgctgggattacaggcgtgagccacacacacacccgcagcccccaccaccaccagtcgtctctattttttaaacgaaagaaaatacagctttcttgattattaacagtcaaaagattcaaagtcctagaccagaagtttcttttttagtacctatgacttaagtttatgatttggattaaagttctctggcagaacacccacaggatgccaaagcctgaggaagatttccgaacaagattacacggttttccaatgggatacatttgatcacgtgtgaaaacatggtggcagcactactgcaaccttaaatgaaagggcaaattctcaggaaacacattctgcttgtaaatattggatgtaaccattctaacagttatttacttttaacttgagaaattttaaagaaatgtagccgggcgcggtggctcatgcctgtaatctcagcactttgggaggccgaggcgggtggatcgcctgaggtaaggagttcgagaccagcctggccaacatggtgaaaccccatctctactaaaaatgaaaaattagccggtcatggtggcaggcgcctgtatgtaattccagctactcggcaggctgaggcaggagactcgcttgaacccaggaggtggaggttgcagtgagccgagatggcgccattgcacttcagcctgggtgacagagcaagactcaaaaaaaaaaaaaaaaaatttctagacttttttcctttttccctttctaagcttttaaagattttatgtctgtcttagttttcaagttatacagcaaaacactgtagatccattacagaaacactaaaattttagggtataagaattcaaagcttctattatctggaacacaagggcacccctcattgccagtgtattctgttgtgttctgtttgcatagaatccagcctaaatgctgcccacctggagtgagttgctagatggactgaaataatcctagcaaacttgtaatggtttgggcacaaccactgctcctttgccatctagctggtactgctgctgttaccaggtctgttagatagcgaccgatgaggcctcctggccttgttgatatttctttgcctatcagtggatcgttagttggagtatttccttagtcacagaccggccttttattgggatgttctcagtaggaactacatttgcagataacagatggttatttaaataagaatgtgaaaaatatatatactctttctcttctggggcctaagatggttttttgctgattcttaaacctgtagctgtttttatgagtggatatctgattttttaaaaatctctcatgacatgtaaatgtttaagttgtttgaaaacatttacattttctgaccagccagcaacacttacaatcttccatagttcctaagattaagaaaacaggagaaagctagagagatttggcaaagtatgtaataacctagcaaggaaattcttgagcaagagtatatgggtttgaatttattggaacatttgaaagcaattaaattttttttcctccaaacttatttttgtcctttttaaagcacacacaggcaaacaactgaaaaagatcattgcaagtaaaatgaatcattaagctgatcaagcctagaaaccaccaccagaagtatttatagcattattagggtggagtatctataatccattctcagacttattataagtctcaagatccaccctttgaaaagctaatcctatcctcaatcttcaaatttaattagtatttattgatctcatatggaacgtccagcacagtgttaaaaaggaccatcttcatcaaaaaaaaagaaaaataaaaaaacaaaaaaatggaaaaaaataaagaaattaaagaaaaagcaaatgaaacaaaaggtaccatcttccaaatgtgagaataggtgctcaaatgatatctatggttcaactatacatgtgtgttgaacaaatgtaaatagcatatagtagaagccaccgtaaatgaatcagaatgattcaggctaactttacagtaaactagaagaacactgctgttagatctgtgtatctgccatatttcaaatacaagagtcctcacattttacaaggtcacttaggaaagattagaggacacactctaatatgcaatgtataattctttttttttttttttttttgagacggagtctcactctgtcacccaggctggagtgcagtggcacaatctcggctcactgcaacctccgcctcctgggtttaagcaattctttgcctcagcctcctgagtagctgggattacaggcgcccaccaccacatccagataatttttgtatttttagtagagatggggtttcaccatcttggccaggatgatcttaaactcctgaccttgtgatccacccgcctgggcctcccaaagtgctggggttacaggcataagccaccatgcctggccaattcttttgtttttgttgttctggtcatgcaatgtataattcttttttggttgtttgtttgtttgttttgagaaggagtctttgctctgtcacccaggctggagtgcagtggtgcgatctcagctcactgcaagtttcgctcctgggttcaggccattctcctgcctcagcctcctgagtaactgggactataggcgcccgccaccatgtccagctaatttttttgtattttttagtagagacgggggtttcaccatgttagccaggatggtctcaatctcctgacctcgtgatccacctgcctcggcctcccaaactgctgggattacaggggtgagccaccatacctggccttttttttttttttttttttttttgagacggagtctcactgtattggccaggctggagtgcaatggcatgatctcaactccctgcaacctctgcctcctggagtcaagcaattctcctgcctcagcctatgaagtagctgggattacaggcacccgccaccacgcccagataatttttgtatttttagtagagatagggtttcactatgttgttggccagtctggtctcaaactcttgacctcaggtgatctacctgcctcggcctcccaaagtgctgggattacaggtgtgagccactgtgcccggccgcaatgtataattcttaaagaatacttttttatttttatgattagaaagccttacttggctgggcatggtggctcacatctgtaatcccagcactttggaaggctgaggcaggaggattgctcgaggccaggatttggaggctgcaatgagccacgactgtgccactgcactccagctcgggcaggagagcaacaccctgtcacgaaaaaaaaaaaaaattaatccctacatattatagaaaatttcaaaattgcacccataaacccaacacataacatgcagaaataaccactgttccaattttgctgccttcctgcagctttaaaaaaaaatggccattttccaaaacattatctgggcgtggtggcatgtgcctatagtcccagctacctgggagactgagttgggaggatcacctgagaccgagagttagaggctgcagtgagccatgatcatgccgctgcactccagcctgggcaacagagcaagactctgtctctaatgattgataataataataataatgtaaagctttttatttttcctttttttgagacagggtcttgctttgcactgtcccccagggtggagtacaatgtcaggatcatggctgagactaaaagctcatgccaccacgcccagctaatcttggcttttttttttttttttgatagagtctcgctctgtcgcccaggttggagtgcagtggcgaaatctcggctcactgcaacctccacctcccaggttcaagcaattgtcctgtctcagcctcccgagtagctgggaatactggcacacgccatcaagtccagctaaattttgtatttttaatagagatggggttttgccatattggtcaggctggtctcgaactcctgacctcaggtgattcacctgcctcagcctgcaaagtgctgagattacaggcttgagccaccacacccggccatctttgcatttttatacaaataaaaataagtaaatacgggctgggcatggtggctcatgcctgtgatcccagcactttggtaggccaaggcgggtagatcacttgaggtcaggagttcaagaccagcctggccaaatcatgaaacccagtctctactaaaaataccaaaagaaattagccgaatgcggtggctggtgcctgtaattccagctgctcaggaggctgaggcaggagaatcacttgaacctgggaggcagaggttgcagtaagctgagatcacaccaatgcactccagcctgggtgacaagagcgaaactctgtctcataaataaataattaaataatctttaccctggtcctagggatgaccctgcaaagggaaggggactcgagagtcaggggaaccacagtgggtgggagagagactgacttttctctgtgtaccttttgatatcagaattatgttttaacttcataaaagatacatatgtcgatttttttttttttttgagacagagtctagttctgccgcccaggctggattgcagcggcgcgatctccgctcactgcaagctcctcctcccaggttaacgccattctcctgcctcagcctcccgcgtagctgggactacaggtgcccaccaccatgcccagctaattttttgtacttttttagtagggatggggtttcaccgtgttagccaggatagtctcgatctgctgacctcgtggtccgcctgcctcagcctcccaaagtgctgggattacaggtatgagccaccgtgcccggctcttctcttgttttttattttagaatcaatttttctggggttagggcagggatggggtgaagggcacagtaactaatcataggacacctctattttgcccttgagtagattttcagaaaagccttgacaacacccccagaactagatggcctaaccaaataaaatggcaacacctaaagatacttataaaataaatctttaggcccggcacggtggctcacgcctctaatcccagcactttgggaggctgaggagggcagatcatgaggtcaggagatcgagaccaacctggctaacacggggaaaccccgtctttactaaaaatacaaaaaattagcccgcatggtggcagatgcctgtagtccagctacttaggaggctgaggcaggagaattgcttgaacccgggaggcggaggtcacagtgagctgagatcacgctactgcactccagtctgggcaacaaagtgagactccgtcccaaaaaaataaaataaaaataaataaataaatctttacactatttgtggtttatattctagggctttttcactcattccctaggcatgtgggacctcgaagatgccgaatcagctaaacgggaggtggcttgagtaggatttgctgccagctaaagcgtgagatgctattgcatgtgcaaggcaaggctttcttcagcggcatcatcttccaaaatagcccaggtatatctcaccagaattaaaccgggctgcaggtggcctttcctcatacttgaccaatgacgtgattaatttagatctgttcggaagtatttatttaaatccattctctccctgagtaggtgtgaactttcctcttcctactatttctttgaaatatttccaccttacatgaatgagccattgcactggagcaagttttcttccagaacataaaatagatcatatgtattcacacaaatgtaaaaacgatgtgcaatttgagctttccctcaaagaaaataacagtgattctggttttaattcctggtattaaatgttgcaagattggtaatttgatatccagtgtgagaatctaacatggggtgcctctcttctttgtctatctctattctatttctttttcttttttctttctttttttttttttttgagatggaatcttgcccttgttgcccaggctggagtgcaatggtgcaatctcggctcactaccacctctgcctcccagattcaaacggttctcctgcctcaacctcctgagtagctgggattacaggcgcccgccaccacgccccgctaatttttgtatttttagtaaagacaaggttttgccatgttggccaggttggtctcaaactcctgacctcaagtgatccacctgtctcagcctcccaaagtgctgggattacaggcgttgagccactgcgcctggccctctattctgtttcaatccaactatatgtctggtttgaggaaatagccagggacccacgctgtgattagcccaacaacccaagcagggctgactcctgaagccagagtagtaacaatcagttctggcctggctggtcacggtggctcacgcctgtagtcccagcactttgggcgactgaggaggtggggggggggggcagatcacttgaggtcaggagttcgagaccagccaggccaacatggcaaaaccccatctctactaaagacacacaagaaattggcagggtgttgtgctacacgcctgtaatcccagctactcaggaggttgaggcagaagaatcgcttgaatccaggaggcagaggttgcagtgagccgagatctggccactgcactccagcgtgggtgacagagtgagactccatctcaaaataaataaataaataaataaataggcagggcatggtggctcatgcctatactcccagcactttgggaggccaaggcaggcggatcacgaggtcaggagatcgagaccatcctggctaacgcggtgaaacccggtctatactaaaaataataagattagctgggcatagtggcaggcgcctgtagtcccagctactcgggaggctgagacaggaaaatggcgtgaacccgggaggcggaacttgcagtgagccgagatcgcaccactgcactccagcctgggtgacagagccacactccgtctcaaaaaataaataaataaataaataatcagtcctgacctaatacaacagacatgaatggcaaaaagtttgattgtgcaattttctccataagaggacctgaggcaggtcgtatgcttgctgtctagaaaataatttcaatgtattttggattcatccatactaagcagtttttgctttgttaactgtttcaccttatgagatttttattttgagaacaacgtgtggtgaacgttgggatgtttttttcttcctcctcttttttttcccttctgctttaaaaataagataagcttgcatgcaaatagagttcagggtgaccacagtaacattctcagctttatttactgaattacggagtctcccttcacttgattaagttccatttgcatatctttaacatgagaaacactttattccactttattccattaatgagtcatttgagacatcttcagagtttatagcaatgctgaaagaatggatgtcttctgtatgaaaacttaggggttgttttatgtgcagagaaagagagagacaaatagaggttttttaaaaaaaaaaattctaaaactgaaatgtgctcaaatgaattaaagatatttgaaatatatttatgtatgtatttctagctaaagaaatatatagtataacattctcattctatgaagaaataggctatttccttttgtgctacatataattagttttctttttttttttttttttttttgagatggagtcttgctctgtcacccaggctgcagtgcagtggtgcgatgtcggctcactgcaagctccgcctcccaggttcacgccattctcctgcctcagcctcccgagtagctgggactacaggtgctcaccacctcgcctggctaattttttgtatttttagtagagacggggtttcaccgtgttagccaggatggtcttgatctcctgacctcgtgatccgcccgcctcggcctcccaaagtcctgggattacaggcgtgagccaccgtgcccggccatataattagttttcgaagaagaataataactctatatgtttactatttttatttttttaatttaatttttttttatttgagacggagtcttgctcagttgcccagactggagtgcagtggcacaatctcggctcaccacaacctccacctcctgggttctagcgattctcctgcttcagcctcctgagtagctgggattacaggcgtgcaccaccacacccagctaattcttgtatttttagtagagatggggtttcaccatgttggccagactggtctcgaactgctgaccttgtgatccacctgccttggcctctcaaagtgctgggattacaggcgtgagccaccgcactcggcctattttattattttttattttatttttggagagcaatggcacaatttcggctcactgaaatctcgacctcccgaattcaggcgattcccttgcctcccggagtagctgggactacaagcgcccaccaccacgctcggctaatttttgtatttttattagagacagggtttcaccatgagggccaggctggtcttgaactcctgacctcaagtgatctgccagtctcggcctcccaaagtgctgggaatacaggctgtgagccactgcgcctggcctgaatttttattttttttttttgagatggagtcttgctctgtcgccctggctggagttcagtggcaggatcccagctcactgcaacctccgcctcctgggttcaagcaattctcctgcctcagtctcctgagtagctgggattacaggcatgcgccaccacacccagctaattttttgtatttttggtagagacgggtttcaccatgttggccaggctggtctcgaactcctgacttcaagtgatctgcctgcctcagcctctcaaagtgctgggattataggcatgagccgctgtgcctggctgaatatttttacataggaaaacaaaagagagagaaaaagaaagacaatctcaatgcttttctcagaaagaacaggaagcctcaaggaggaagtaggtgacagtttatttttcaacaagcacacgttatcaagtgaatgaaattcctctggaagctataaaattgaagattggaggatggcagtgttcagatagcatgaaaggttgctcactatttaggaatttttttcaaagctaagttattaatgaaagccaattatttgcacttttccagaaggaaacactgagtcattcatgaaatgatctaagattttgaaacttgcttacaccatttttttcccctcctcctttcttacctgtgccaaaaacagaaaagccaactactcactggggcctaaatccagggagcctgcaccaaattagctcaagactggagtaatttaacagactcgtgatgccccgaaggcttaggtcctaccaggatggtaaactctgaagtgcctccattgcccccgcagggtgcagagcacaggggcctggtccccacctctggagggcctgtgattaactggttctggctcagtaattatttagccatatccctggactgcctccaagtttcaagtcgaacagcaaaagggcgtgggcccgcagataggcagaaccgtgctcctaggaggcattacttatttacagccagatccctacggaatttggccagagatgggatacagatgagaatgtgtttggctaggaaatactgacttcttgatgcatttatggaaagtttgtgagcttaggccagtaaaccatgtcaaaaacacagtcaacaaatgtttgtttcaggaataaactgtgagtgaggtggttttaacctagggacagcttcattctgtttctttcctggtgagactatttctaggtactttttaaaaaacgtacgttgaggcaaattcactaagagtcaaaccactgaagtttctggttaggccatcagtggaagctgcttatttcatcttcacaaacaactgtaagtccatgtagataaataatgtagacaaggaaacaatgttttgatccaaacaatacagaaaagcttggaattgtgcctccttaacgtaacaccttatgtttgcattgttctgttaaaaggattttacagatacattatcttaaaatgacactgcaaggtacagaggggaagttgaatgtcccatttcacagattagacaacggtggctcagagagaccatgaccttccgaaggtcacaaaattagtacattgcaaagtccatgcttaaatccagggcccctggcaagagtgctgagcttgccccttacaaaccggatctgaatgttcccttctgtataccaggactctgtgagcttatgtcctttggttttgcattaaacctgagcttttagctcctagaattcacaaggaatattcaagtctatttccactccctaccttgaagctcctggtctgttttcacaacaggggatgtgcctgtttgagaaggaagtggtctagagtctggtattagtgtaaaatggcttcctctttttctccttgaatttattctggtagtattttatcccaatactcctcccccgcagcaaaaaaatcccaaattctgcaacacaattgaggaacttaaaaaaaaaagaaaagaaaaacctttctcatccactaagatgttactaatgatcaccagtgatttttaattccctttgtatatgtgtgtatttttcagctttttttttaaacaatgatatagggtggggttttctaacatttagggaaaaaattatttttaaaaaatctcattatttttgtgtaattcacatggtgtaattcacacaatgggtggttattactaacaccagtaggaaaaaatatcacaggagcttcatgacaaatccttaggcagggtttaggtctcactaatttagaatatgcctggtaagcactggttaaaaattgatgatcccgggaagtctttctcaaacgatttttgtaaaatacctaggagaccttgaactgtctgttacggaggtttccaatcctgaggagaaggacggagggtggcgttcacgagggatactgcctattactcagcttaaagtccccttggctctgccctcctcctcctcctcgtgctgcgagctgggaggagtcagcgttttctctccctaactggcattttcactaggcagaatacttgtcttttgtgaacgttttcattttcaagacatataaaagaaaactttgttctttagtaagtgattttctcccccgacagggagagggttacaaatccctccctctccagcggagttttcttatctcttatttacagagcagtagccattttggggagggggaaaagttgtcagcaactcacgtcctaataatggcagatatttttcttaagccctcaccatgtcccaagcactctcccaagagttttacatgtattaactcagttaatccttcctagagccttatggtatacgtgctattaggatcccgattttacagaggaagagactgaggaacagaaatgtaaactaacctgccaagatcacacagaggctgggattagctctctgacctctgtcccagaggcagaatttttttctaatctcacgagtataggtgaaagtcagagtctcattacagattgagactgaacagaaagttggaatccattgaaaaagaggtgtgtgacattgatcaaggccagcacttttatttttgcccatttatacttccttaaaaatctatgagccaactctgttgttacaacacaaacatgcagtggttccctagccaggtcaggtcagctagaaaatacaacatacgctcttgaacaactagatttatttcaacccaattttcaatgtttatataattcaattgtaaaatgttaaaacttggaggattttattcaccagctgaaggactcatagttactatctttaaaaacagcagtgaataagcaaactataaactaacaaaaaaaccaagcacaacaaaacaaacagcaaattaggtttaatcataatgcttgggagaatatgtatttggcttaattatattttcttctttttttttttttttttgagatggagtttcgctcttgttgcccaggctggagtgcaatggcacgatctcagctcactgcaatctccgcctcctggattcaagcgattctcctgtctcagcctcataagtagctgggattggccgggtgcagtggctcacacctgtaatcccagcactttgggaggccgaggcaggtggatcacgaggtcaggagttcaaaaccaggctggccaagaaggtgaaaccccgtctctactaaaaatacaaaaaattagccgagtgcagtggcaggcacctgtaatcccagtactcgggaggctgaggcaggagaatcgcttgaactcggagggcggaggttgcagtgagctgagctcgcgccactgcactccagcctggcgacagtgtgagactccatctcaaattaaaaaaaaaaaaagaaaagtagctgggattacaggtgcccgccaccatgcccggctaatttttgcatttttagtagacacagggtttcatcatattggtcaggctggtctcaaactcctgacctcaggtgatccacctgcctccgcctctcaaagtgctgggatttcaggcgtgagccaccgcgcccggccaattatattttctagttactcagctatctacaaataaaggttttgtttcatctttacatattttaaatatgtcttactatatatttatatgtatacataaatatttcttgtactcttttaatatgtaaggaatagttttccatctttaaacatgtttaatatggtaaacatccttttttatgaaacaagattgaatatcaataaactaaaccacaagtagaaaaaactatcatttttcatggagaattcacagttctttaatgctctcattctgaatctgaataatcattcatgatgaaatagaaagcacaaataagttttacccacatggactcttcataacattccctggaggcttcctttttcagaccaaatctttaatatcagttctgtccttatgatttatctcttcctccttcaaaagagaaagtaaaaaaaaaataaaaattaaaggcttttttttttttttgagacggagtctcactttatcgcccaggctggagtgcagtggggcaatcttggctcacttcaacctccaccccctgggttcaagtgattctcctgcctcagcctcccgaatagctgggattacaggcacctgccaccgtgcccggctaatttttttatttttagtagagacagggttgcaccatcttggccaggctggtcttgaactcctgacctcgtaatccacccaccttggcctcccaaaatgctaggattacaggcatgagccaccgcgcctggcctaaagtctcagtttttatacatacacacacacatattttttaatgtggcacacactatatagaatattgcagtgcaattttaatgagaaagaaaaatgatctttgagacacaactgaaattgaagtacacagaacttatattgttcattaaaacttgtctttattatacagtttctaaacactgaaggacacaggcaaaagctatgaccagtataaatttaattaagctttccattctgtgtatgatgaaaagaaccgaagtctgtcattttaaagtgaactccatgtaaatcccaagagaaaagtgtaaatgattttattgtatgaaaaagttcagtgaactttgaaattcttattgagcataatagacttatactgatcaaaccaggccaggtgaagtgactcacacctgtaatcccagcactttgggaggccaaggtgtgaggatcacttgagcccaggagtttgagaccagcctgggcaacaaaatggcaccccatctctattaaaaaaaaaaaaattaaaaattagctgaatgtggtggtgcacacttgtggtcccagctacacaggaggctaagggcaggaggcttgcttcagccaaagacgtcaaggctgcagtgagctatgatcgcaccactgcactccagactgggcaaaagagtgagcccctgtgtctaaataaataaataaataaataagaaaaagccaaaccccatgatgcaaaagattttgccaatccccctgcaccaagaagtggtgttccctcaccacaaacagaagatgtttcattcagggaatccttcactaaaggaagacatagtaagccaatgcagccaaaaaaatcatctatgcaaagtccatggctgtcttctatctttagcattacagatctcagaatcaaatagatagaggctgagtggggtggtttatatctgtaatcccagcattctgggaggccaaggtgggaggatcatttgaggccaggagttgaagaccagcctgggcaaaatagcaagaccccatctctattacacttattattatttttttttgtcatttttttttttaatttttgtggagaacggggcctcagtatattgcccaggcaagtctcgatctcctgggctaaagctatcctcctgcctctgcctccctgagagctgggattacaggcatgagccattgtgcccagccttgaggggagttacagttctttttttggtctttttttttttttatctctattaaaaataaataaggctgggcgcagtggctcacgcctgtaatcctagcagtctgggaggccgaggtgggtggatcacctgaggtcaggaattcaagaccaacatggtgaaatcccgtctctactaaaaatacaaaaaattccccaggcgtggtggcacatgcctgtagtcctagctacttgggaggctgagcaggagaattgcttgaacctgggaggcggaggttgcagtgagtcgagatcgcgctattgcactgcagtctgggcaacaagagcgaaactctgtctcaaaaataaatacataaataaaaataaataaaaaacaaatagatatagaaagaggtttatgacatgactgatctgtaatctgagaaaaatcctatcagtgtgcaatacatgaaaatcttaccctgggccgggcgctgtggctcatgcctgtaatcccagcactttgggaggccgaggtgggtggatcatgaggtcaagagattgagaccatcctggctaacacggtgaaaccccgtctctactaaaaatacaaaaaaattagccgggcgtagtggcggcacctgtggtctcagctaactcaggaggctgaggcaggagaatggcgtgaacccgggaggcagagcttgcagtgagctgagatcgcaccactgccctccagcctgggcaacagagctagagagagagactctgtctcaaaaaagaaaagaaaagaaaagaaaacttgcgtagtgtttgcaagtcagcttctccttggcacaggaaatagaatacccgaggcccatgataattttaggggcccacaaaaatatttttattttaatttattttaaggacagaagagaacatgaataatattcatatatatagtaatataaagcattcatatataatatatagtaatgaatccagcctgaattatatttcctcttcaggccaatgtagtcataaaatataatttttcatatccttttatggaggaaggggtccacaaaggcaaatatatctcaggcccttaagagtcatgattgggctgtgtatgctatggaaacctgtaaggagcttggaggtggagggagtttggatgaggcttctaggtaggagggacccattgagtggagacctgaagggagaatagaaatcaactacgctaaaggcagggcagaggccaggcataatggttcacgcctataatcccaatactttcagagtccaaggcaggtggattacttgagatcaggagttcgagactagcatggacaacatggcgaaaccccatctccactaaaaattaggcaggcatggtggcatgtgcctgaaatcccagctacgtgggaggctgaggcaggagaatcgcttgaaccagggaggcggaggctgcagtgagccaagatcgtaccacagcactccagcctgggcaacagagcgagactccatctcaaaaaaagataatattaataataaataaataaaaaataaaggcacgacagggaggaatgaacactgagaaggtagaacaaggaagagttttcttttttttttttcttttgagacagagtcctactctgtcatccaggctggagtgtagtggcgcaatctcggctcactgcaacctccgactcccaggttcaagcgattctcctgcctcagcctcccgagcagctgggattacaggtgcaccaccatgcctggctaatttttttgtatttttagtagagacgggatttctccatgttggtcaggctggtctccaactcctgacctcaggtgatccacccgcctcggcctcccaaagtactgggattacaggcgtgagccacctcacccggccaggaagagttttctaagtagagggaacaggatgtgcaaagcccctggggtaggaagaaacaggaacatttgaagaactaaaagaagaaagtaacactggttagagaaactgcagccaggggaagaatagtgtgaaaagaaacagaagccagtcaatgctgggcttatagacaatgggaaaatatgttctgtttttttctctcctttgcctgatctctagtttgcttacaaaaggaaataaagatttccttttattggtttgcaaattgtacatgagtatctactttatcttttttttttttttttttttttttttgagacagagtttcgctcttattgcccaggctggagtgcaatggtgcgatctcggctcaccgcaacctccgcctcctgggttcaagtgattctcctgcctcaggctcccaagtaactgggattacaggcatgcaccaccacgcccggctaattttgtatttttagtagagacggagtttctccatgttggtcaggctgttctcgaactcccagcctcaggtgatccacccacctcagcctcgcaaagttctgggattacaggcgtgagccacctcgccaggctagttattatctttttctttctttcttttttttgagaaaagatctcactgtgttgcccaaggtggactacagtggcatgaacatggcacactgcagccttgacctcctaggctcaagcgatcctcctgcctcagcctcccaaactgctaggattacaggcatgaaccaccacacctggccagttattatctttttagtgctaataaccatctaggttttggttgtttgttaggatttggagatatctctgaaaaaagaaggaagaaagcattcatgtttcttcatatagaatgaaccaatttataaaaaaaagaaatgaaccaacttctttgtctttcagaagttttcttagatactgagatttgatagtgaggcaggataatccagttgtcatcatgactattataatttgaaatgttcccaaaagctttatgtctgactgtaaacatattcatgaagattttagtttcacaatacttactctttaccattatagaacaaaggtaatgtattttggtaactgcgaggtaaaaggagaattaaaactgtaaatacaggcctccgtcagtatttatgggggattaagttctaggccctcccatagataccaaaattcacagacgctcaagttccttgtataaaatggtgtagcatttacatataacctaaacatattctccagtatactttgtcatgtcatctctagagtcctgttttttttttttttttttttttgagatggagtctcgctctgttgcctaggctggagtgcaatggcgcgatctcagctcactgcaacctccgcctccagggttcaagcaattctcctgcctcagcctcctgagtagctgggattacaggtgcgtgccaccacgcctggctaatttttgtatttttagtagagacggggtttcaccatgttggtcaggctggtttcaaactcctgacttcgtgatctgcctgcctcagcctcccaaagtgctaggattacaggcgtgagccgcggcaccggcctcttttttttttttttttttttttttttttgagacggagtctcgctctgtttctcaggctggaatgcagtggcgagatctcagctaacgacaacctctgactcccgggttcaagcaattttcctgcctcaacctcccgagtagttgggactacaggcacatgccaccatgcccaactaatttttgtatttttagtggagacggggtttcactatgttggccaggctggtcttgaactcctgacctcgtgatctgcccgcctgggcctcccaaagtgctgggattacaggcatgaaccacctcgcctggacccaacttatttattctgtattccttttttttgagacggagtcttgctctgtcgcccaggctggagtgcagtggtgcgatctcggctcactgcaagctccgcctcccgggttcacgccattctcctgcctcagcctcccgagtagctgggactacaggcacctgccaccatgcccagctaattttttgtatttttagtagagacggggtttcaccgtgttagccaaggtggtcttgatttcctgacctcgtgatccgcccaccttggcctcccaaagtgctgggattacagacgtgagccaccgcgcctggccccaacttatttattcttaatatccactaggccaaatacagtggctcatgcctataatcccagcaaattgggagaccaaagtgagagcctggcttgagcccaggagtttgaggctgtagtgggctatgatcgtgccactgcattccagcctggacaacagagcaagaacctgtctttatttatttatttatttatttatttatttatttatttattgagacagagtcttgctctgtcaccagactggagtgcagtggcgccaactgcaacctctgcctcccaggttcaagcaattctcctgcttcagcctcctgaatagctgggattacaggtgcccgccaccacgcctggttaatttttgtattttttagtagagatgaggtttcaccatgttggccaggctggtcgtgaactcctgacctccggtgatccacctgcctcggtctcccaaagtgctgggattataggcgtgagccaccgcgctcagccaggactactttttaaaataataaaggctgggcacgggcacagtggctcacccctgttatcccaacaccttgggaggctgagcctggaggctcacttgagcccagtgggttccagacaagccttgaaaacataatgagaccctgttattttttacaaatcgtaaagatttgtaaaatccttgtaacattgtgccatcgcaccccaccttggccacagagcaagacgttgtctcaaaaagtaataattcgttaagatcttagacaaggtctatacattgtgcttggttgttattctgcatctatcatatatgaagcctgaagcctgatgctggtgcagggtgtgtacctaagaaaagcaccttcctctccccgccttgccccttggcgacgaggctcaaggctccaggctgaagaatcaagttgatcatcacaacagcagtagcctcctaagcactctctgcagctccactctaacttcccctccgggctcttctcttcagaggtgccattcacgccactgatctttgttgagctcctactgtatgccagatacgtcaggacacattactgcaaacagaaaccttggtcttcatggaggtgacagcttaggggtttaggaggggagattttaaaaaatgataaacaagatagtaagttaaatatagaaaagacagatgatgataagctgttaagaaagaaggatagggccgggtgcaatggctcatgcctataattccaatgctttggtagggcaagctgggtgaatcgcttgaggccaggagctaaaggctagcctggacaacacagcaagactccgtctctacaaagaaaacaaatttgaacaacatttttaaaaattagctgagcggccaggcacagtggctcaagcctgtaatcccagcactttgggaggccgaggtgggaggatcacctgaggtcaggagttccagaccagcctgaccaacatggagaaaccccatctctactaaaagtagaaaaattagctgggcgtggtggcgcatgcctgtaatcccagctactccggaggctgaggcaggagaattgcctgaacccaggaaatgaaggttgcggtgagccaagatcatgccattgcactccagcgtgggcaccaagagcaaaactccatctcaaaataaataaacaaaaataaaaataaaaattagctgggcaggccgggagcagtggctcaaacctgtaatctcagcactttgggaggccaaggtggcagatcacctgaggtcaggagtttgagaccagcctggccaacatggtgaaaccctgtctcttctaaaaatacaaaaattagccaggtgtggtgggcatgcctgtaatcccagctactcaggaggctgaggcaggagagttgcttgaacccggaagggagacgttgcagcgagccgaggttgcatcattgcactccagcctgggcgacaagagcgagactttgtctcaaaaaaaaaaaaaaattagctgagcatggtggtgcccacctgtattcccagctacttgggaggctgaggcagagggaatcccttgaacctaggtgttcaaggcagcagtgggctaggattgtgccactgcattccagcctgggtgacgagagagagagagagagagaagaaacagcgagccaggcacggtggctcacgcctgtaatcccagcactttgggaggccgaggcgggcggatcacgaggtcaggagatcgagaccatcctggctaacgtggtgaaaccccgtctctactaaaaatacaaaaaattagccgggcgtggtggtgagcacctgtagtcccagctactcgggaggctgaggcaggagaatggcgtgaacccgggaggcggagcttgcagtgagccgagatcgcgccactgcactccagcctgggcgacatagcaagactctgtctcaaaaaaaaaaaaaaaaaaacacaacatgtggcctgactctaccatcttggacagcacaaatgtagatttctatcatcacaggaagttcggttggacagcattgctctgtaggattcatctgactctggttttcctagatagatagatagatagatagttagatagatagatagatagacagatttttttttttttttttgagatggagtcttgctctgatgcctaggctgcggtgcaggggtggaatctcagctcactgcaacctccttatcccaggttcaagcgattctcctacctcagcctccctagtagctgggattacagatgcccgccaccactccctactaatttttgtatttttagtagagacggggtttcaccatgttggccaggctggtctcaaactcccgacctcaagtgatccacccgcctcggccttccaaagtgctgggcttacaggcatgagccgccgcaccaggtcatgtttttatttattttttgttagatactgggtcgtgctatattgccagagctggtctcaaactcctgggctcaaatgaccctcccgcctcagcctcccaaaatgctatttttcctttttacgtgttaaagaaacctggacacatgtctgtaaaagttccccacgttttaaactctggtgatttccaactccctggtgttattgaacctgtttctccattctctgtacttcctgtaaaccaggagttagacctggaggcctgattagatgcagggttgattcttgggagcagttgaagatgacaggcaacctgattctcggtattgtgttagaaagcacacagagtgagtggaatctagaaggatgtacaccagcacgttatcggtagttattttggggaagtagagtgaccttatttttgctgatctaaattttatttctttttttcacagtgagcatgcctttctcctgaaaaataaaaaatagttggtgtttactgcaatcgtatggcaaatactgtgttgagagattaatttacatgaactcatagaaccctcagggcaagtttatgaggtatttaccatctatgctctgcagtatttatttatttatttatttatttatttatttatttatttgagatggagtctcactctgttttccaggtggagtgcagtggtgcaatctcggctcactgcaacctctgcctcccaggttgaagtgattctcctacctcagccacccgagtagctgggattgcaggcatgtgccaccatgcctggctaatttttgtgtttttggtagagatgggagtttcaccatgttggccagactggtctcgaactcctgacctaaggtgatccaccttcctcagcctcccaaagtgctgggattacaggcgtgagccaccgtgcctggctgcagtaaacattcagaaatatgaagtaacttgcccgagttcatatggtcggtcttgggtagaggtggattttatctgtcagctgtctgactctgaagggattctgattctggaaagtgtggcatgcaacctgagagacttaatttctttctggaagattcccttaagttattctgatgcagacccaggcctgagaaccacagcctctctgcccaccacatgatgtcaccatccataaaacatctgctctccagcctaaatttgctctcagctgaaaagtattctgtgcccatcacatgtgaagcctgaagcacgatgctggcgcagtggacccaacaagagcaccttcctctccccgccttgccccttggagacgaggctcaaggctccaggctgaagaatcaagttgatcatcacaacagcagtagcctcctaagcactctctgcagctccaccccaacttcccctccaggctcttctcttcacagtgccattcatgccactgatctttgttgagttcccactatatgccagatacgtcaggacacattactgcaaacagacagaaaccttggtcttcatggaggtaacagcttaggggtttgggaggggtcagtaaaaaaaagataaacaagacagtaagttaaatatagagaaaggcaaatgatgataagctgttaagaaagaaggatagggccgggtgcagtggctcctgcctgtaattccaatgctttggtagggcaaactgggagaatcgcttgaggcctggagctcaagagcagcctggacaacatagcaagactccatttcttaaaaaaaaaatttttttttttgagacagagtttcgcttttgttgcccaggctggagtgcaatggtatgatctggactcactgcaacctctgcctccccagttcaagcgattctcctgtctcagcctccctagtagctggtattacaggtgcatgccactatacccggctaatttttgtatttttagtagagacggggtttcatcatattgatcaggctggtctcgaactcctgacctcaggtgatccaccgccttggccttccaaattgctgggattacaggcctgagccactgagctcggccacaaaaaaaaagaaaaaaaaattaacaaattagccagacatgttggcgcccagttgtactctcagctacttcaggggcaggctaaggcaggagaatcccttgagcccaggagttcgaggcagcagtgagctaggaatgtgccactgcactccagcctggatgacagagtgagacagagagaggaaagaagaaggaaggaaggaaggaaggaaggaaggaaggaaggaaggaaggaaggaaggaaggaaagaaggaaggaagagaaagaaagagagaaagaaagaaaagaaaggaaaggccggccacagaaagaaaagagaaagaagagaagagtaaagaaaagaaatgaaatgaaaaggaagaaaagaaaaggcgaggtacagtgcctcatacctgcaatttaagcactttggtaggctgagacaggaagattgcttgaggctaggagtttgagaccagcctgggcaatgtaccaagaccttgtctctacaaaaatttttaaaaagttatccaggcttgatggcacatgcctgtggtcccagccactcgggaggctgaggtggaaggatcacctgagcccaggaggttgagtctgcagtgagccatgatcatgctattgccctctagcttgggcaacagagcaagaccctgtctcaaaaacaaaaaaaaaaaagaagaagaagaggaagaagaagaagaaaaagaggaagaagaagaagaaaaagaggaagaagaagaaggaggaggaggaaaggaaggaaaggaaggaaaggaaaggaaaggaaaggaaaggaaaggaaaggaaagggaaaagggataggttgaatagggattgtgtgtgtgtttgtaatttttgagagcatggccagggaagtactccctaaggcagggggtcaactaattacggactgaggccaaatccagcctattgcctgtttatgtacaatggcaagctaagaattgtcttacatttttaaatagttgaaaaaagtcaaaggaagaatgttttctgacacctgaaagtaacttatgtgacattctatctcagtgcccacagtgaagtttcttttttttttttttttctttttttttaccctgagtcccgatctgttgcccagactggagttcaatggcatgatctcggctcactgcaacctctgcctcctgggctcaagcaattctcctgcctcagcctcccgggtagctgggattacaggggtgtgccaccacgcccggctaatttttatttttagtagagatggggtttcaccatgttggccaggctggtcttgaactcctgacctcaggtaatccacctgcctcagcctcccaaagtgccgggattacaggcgtgagctaccgtgcccggtatcaatgaagttttattggaacacagctatgctcattggtttacttactgtctgtggttgcttttgcctgacaaaggcagagttgagtatctgccacagagaccctgtggcccacagaacctaaaatatccaccctctggtttgtttgtttgtttgtttgtttgtttgagagggagtttcgctcctgttgcccaggctggagcgcaatggtgcgatcttggctcactgcaacctctacctctcaagttcaagcgattctcctgcctcggcctcctgagtagctgggattacaggcatgtgccaccaggcctggctaattttttgtatttttagtagagaagaggtttcaccgtgttagccaggatggtcttgatctcccgacctcaggtgatccgccctccttggcctcccaaagtgctgggattataggcatgagccaccacgcccagcctactctctggtttttaaccattcgctgactcctgccctaagatgtcatttgaagagacacctgaggcaggtgagggagccagtcatgcatttatctgggggaatattctagcagatgtcacagcaaatgcaaagaccctgaaataggatgtctgctgtgttcttggcaaggcatgaaactcactatgactggagcagagtggatgaggtcagaaagcaaggatggaccagatcacgcacagtctttgctcctagcctgaggcagatgggagccatggcaggtgtgtgtgtgtgtgtgtgtgtgtgtgtgtgtgtgtgtgtgtgtgtgagagagagagatagggttttgctctgtcatccaggctggagcacagtggtgcaatcatagcttactgcagcctcaacctcctggcctcaagtgatcctcccacctcattctcccaagtagctgggactacagacatgagccaccatgcctggctaattttaaaatttcttgtagagatagtgtctgactacgttgcccaggctggtcttaaactcctgtcctcaggtgatcctctcaccttggcttcccaaggtgccgggattatagctgtgagccactgcacccacccgccatggcagttttgaggcaagcggtgatgtggtctggcttattttaacaggatctctctattttaagaatagactggctgggcacggtggttcacatctgtaatcccagcactttgggaggccaatgcgggtagatcacctgaggtcgagatcagcctggccaaaatggcaaaaccccgtctctactaaaaatacaaaacttagccaggtgtagtggtgtttgcctgtaatcccagctacttgggaggctgaggcaggagaatacctcaaatccgggaggcagagattgcagtgagccgagatcacgccactccactccagcctgggcaacaaagtgagactccatctcaaaaaaaataaaaagaatagagtgaaagatagagtgaaagggagggcaagaatggaaacagtgaaactagcaatgaaggcattctaataatctggatgacaaatgatgaggggttgagccagggagctgacagaggagctggaatttatctagtgggattctacatccatgttgaaggtacaatagacaggatttgctctagactagatacatgagggagcagtcagggatgactccgaggtttctggcctaagccaataaatgctggactctcctttaccagaactgagaagactgtgggaggaagacaaggtactcagtttgtgttatagtaagtttaagatgccttttggatgttccagtggaattgtcaagtaagtagctggatatggaaagcaagagctgggaaaggtctaagtttgagatacatatgtgggtgtcagcatcgtagggccatagcactggacgacatcactgagacaagggatgcagatgggaaagagaaaatgtaactcataccatgcttattgcttaccccatcccacagatgacctctccagtgggctttcatctttttgcataataaaatctaaagttcttaccatgtcaatgtttccagagcactagtcttaccaattttctcctggcctatcagctattaatatcattgcactatcctttcctttcttctggccgagccagctcattcagccctggggtctttgtctgcagtctcctctgcctggaatactcatagacttttgcatggcttgctggttaactttattcatagcttggtccaaatatgagcactgcagggaccttccccaactcctttaaccaaacagctccccattcatcttgtgtccatgaccctgttttattttctttctacctataaatttgtatgtttagtgtttgtcttctttggtgaaactgtaagcttccactagggcacggaaattgtcttaccgttgagcaaagcctgacatcatagaaactcaaatatgtgttaaatttaatgagtaaataagggaggtacaataattttctgctatttacattctgcattttctacccaaaagcctagcaatgtaccccataaacactcagtttaggagaaggctttgggctcagtcacaggcttcaacactagacatgcaggcagtaacagaggggacttgggaaccagagagtgcaccttccagacaaggagggcaagataaaacattcctgagtttgggcagttttatatgacgatcaggatagacaactataaaataaagtgagatgagacgggaggaacaggcaatggttagacagtccctttccagttccttgtctgccctatctttgcaggtgaaggggcttctcttgggtgtttggcaaggcaagttttggtctgattctgcatgggtgaagatacgaacaccaggatggaagactttacagggatatccaagttgcagccaaacaaagtctcactctgtcgcccaggctggagtgcaatggcatgatctcagctcattgcaacctctgcctcctgggttcaagcgattctcctgcctcagtctcctgagtagctgggattacaggcaccctccaccacgcccggctaattttttgtatttttagtagagacagtgtttcaccgtgttagccaggatggtctcgatctcctgacctcctgatctgcccgccttggcctcccaaagtgctgggattacaggcgtgagccaccgcgcccggccttctttatttttttgagacagagtcttgctctgttgcccaggctaaagtgcagtgagtccaatcttggctcactgcaacctccgcctccttggttaaagggattctcccgcctcagcctcctgagtagctgggactataggcgtgcaccaccacaacctgataatttttgtatttttagtagagatggggtttccctatgttgaccaggctggtatcgacctcctggcctcagatgatccacccgcctcggtctcccagagtgctgggattacaggcgtgagccactatgcttggccacaaaatgactttctgtaggtctctgccaacaaagagaatcaactttcatctattcctaaaataaaagcaccttggagaaggaaaaacgagaaaaaatgagcagttatgggctgggtgcattggttcacgcctgtaatcccagcactttgggaggccgaagaaggtggatcacaaggtcaggagcttaagaccagcctgaccaatatggtgaaaccctgtctctactaaaaatatttaaaaattagccaggtgtggtagtgtgtgcctgtaatcccagttactcgggagacaggcaggagaatcgcttgaccccaggaggcggaggttgcagcgagccgagatcgagccactgcactccagcctgggcgacagagcaagactctgtctcaaaaaaaaaaaagagcagttatgttgaaaggacagaacttggaagggcagcttgttgaaatataaaaggagggtattttagggcagtgaaactattctgtatgatactgtaatggtagatacatgtcactatgcatttgtcaaaactcatagtcctgtacaacacaaagagtgaactgtaatgtaaactataaacgttaattagtaataatgtattactattcgttcatcaagtgtatcaaatggaccacatcaatgcaggatgttactaatagggggaattgtacagatggaaggagggagttggagaagagggcatatgagaacttgtcacaccgtctggtcaattttctgtaaactaaaactcctctaaaaaaataaagtctgggtcgggcgtggtggctcatgcctgtaatcctagcactttgggaggctgaggcgggcagattacctgaggtcaggagttcgagaccagactggccaaaatggtgaaaccccgtctctactaaaaatacaaaaaaattagctaggcctagtggcacacgtctgtagtcccagctactcaggaggctgaggtatgataattgcttgaacccaggaggcagaggttgcagtgagccgagatcatgccattgcactccagcctgggtgacaaaagcaaaacgccctctcaaaaataaataaataaataaagtctgttaatttaaaaataaataaatgcttaaaaggcactctgtctaatgagtacaaaaattggaaggaaaatgacccttcacttcactgttgcatgaacaggaaatggaaatgtttttgggcatatgtatctcttgggagagtgaggtggaaaacaataccagccaccattctttaatttggattgatccactgttcttgattttgaatagcaggtggctttgctgtggtgttattgttgttgctctttttttgtttgtttgtttgagacagagtcttgctctgtcgcctaggctggagcatagtggcgcgatctcgactcactacaacctccgcctcccgggttcaagcgattctcctactgggattacaagcacatgacaccatgcccggttaatttttgtacttttagtagagacaggatttcaccatgttggtcaggctggtctcgaactcctgacctcgtgaaccacccaccttggcctcccaaagtgctgggattataggcgtgagtcactgtgcccgaacgttgctctttaatgttagtattttgttatcccaaagaaagctctcagaccacggagactcttaaaagacaatatcaaatgtttcaacaactgacaaacctcagacttcctgtatttctgtaagttgcagttttcccttccttcttcttctaatttgttaatatctctggggccacaggctctctctctctcacacaggtctctaactagatcagtggatcaaaggtgaggctttgctaagtaatcagggtaatttcaccggtgtagcaagctattaaaaacagacctgcagggtttttcaaggacaaccaaggtattgatttggcaaccaaaaactcctgtagtgcaagcaataatacaccagggccagtgtttccaacaccgtcacaactcctccccctccctgtccctagtgacattacaaaaggcacagctaaggccgatactccagctcctatgcccctgctcctgtcttcaaaaggaacgtcactgttataaattagacaagggaagaaaaacctcatttctttgatgatttttttaaagagctttgttttcccacgcataattgttcttcctattcattatgcctttatgtagactttgctttttcctttaaagaatacacttcttatgtaatttgttttgcatttctggaatgaggaacttttctgctcatattgttgttaaaatctagacaacacgcccgtgtgatagatcaccctgagccttggaaggaaatgattcaccacaatactgtaactgaaagtcgtctaacaccagggctggaaggcaggctatgaaccgctgcattacctgcgtgcagcagcaatgggaggcagccagaggttccctcggcctgcctagctcacttcagctttgttcctgttctgtttcctccgtccgagtagcaggatgctggaaattcatcctccatttttaagttttaaaagaaacccaaaaattgtgattttttttttttttttgacaccgagttttgctcttgtcacccaggctgaagtgcaatggcacgatcttggctcactgcaacttctgcctcccaggttcaagggattctcctgccttagcctcctgagtagctgggattccaggtgcccagcatatgcccagctaatttttgtatttttagtagactcagtgtttcaccatcttggtcaggctggtcttgaactcctgacctcaggtgatctgcccatctcagcctcccaaaatgttgggattacaggggtgagccactgcacccagctgggatttttaataagccacatctgcccaaatgggcctttccaggctactgtcttataattttgcacttaaatttgtatttaaaccacacattaatgcactgtatggaaaaagtgaacaccaaacatacctattactaataaaaagatttcaaacaataaagccaaaagagcagagaaactaaaaataaaaaatatgtattttattttcctctgcatgtttttggtgaaggcagatcatagattacgcccatgtcagaaacaatgcaattttataattcttatgaaaaatgggccaggcgcaatggctcatacctgtaatcccagcacctttgagaggcctaagtgggtggatcacctgaggtagggagttggagaccagcctgaccaacatggagaaaccccgtctctactaaaaatacaaaattagctgggcatggtggtgcatgcccgtaatcccagctactagggaggccgaggcaggagaattgcttgaacccaggaggcagaggttgcagtgagccgagatcgctggttgtggtggtgtgcacctgtagtcccaactagtctggaggctgtggtggaagaatctcttgagcctgggaggttgacgctgcagtgagccaagattgtcaccgaactccagcctgggcaacaaagcaagaccttgtctccagaaaaacaaaaacaacaacaaaaaaaactaattaatatttcagtaaaatttaggtataaatttggcaagaatatagttcttcactttttttcactatgctgctcttttctaaaatcaattgatgaaatttaaaaattcgagtgaatgtgtgtatgaaaactgaattaatctgatattttcttatataaatttgatttccatgattacagctgaaattgagtttaagctaacacaaatattcaggtggtttccctccctccctctgtccctccctctttctctttctttctccctttctttctttcttctttctttcgacaggatctctctctgtcgcccaggctgggtgtggtggcgggtgcctgtaatcccagctgctggggaggctgaggcatgagaatcacttgagcctgggaggcagaggttgcagtgagccgacatcaggccacagcactccagcctgggcaacagaatgagactatgtctcaaaagaataaataaaatgaaatgaaatgatgataataataataataatagtgctagtcttaagagtgggctgtgcggctgggcgcagtgtaaccccagcattttgggaggctgagatgggtagatcacctgaggccaagaattcaagaccagcctggccaacatgatgaaacccgtctctactaaaaatacaaaaattatccaggcatggtggcgcgcacctgtaatcccagctacttagagactgaggcaggagaatcacttgaacccaggaggcaaaggttgctgtgagccaaagatcatgccactgcacttcagcctgggcgacagagcaagactctgtctcaaaaaaaaaaagagtgggctgtgacagatggatgacaatccattgaaagcaggtctcagccatctaggtcaatctgggcagctgcttatttctgtaaataaagttttattggaacacagttgagcctactcatttacatattggcaatggcctctgttctacttccggttaagacaaagcctctagcgctcaaagcctaaaacaggtattagctgatgctttgcagaatgtttactgacccctaatctaaagtatttagtacagttactcgcatctggaagatacctgctatttatatgttaagtaaactcaaaggcaaagatcagcttctgtttatcattcttcctttccctgggttcagcaaaggccttgcacatgtagtgtgtgctttgtgaaatatgaagttaacataattcatgacaataaaatataattgtcatgatatagcattcagagaaagttgataagtaataaaactttgggcacagtttcaatttaaaataatcccaatctactttttcagtattccgtaatttcagttagagtgcaaataattatgtaatattggaatgccattcaactggcttgtatttatgtgaagagaagttggtcaatgtgaaaggaaaccaacattaccatcttttttttttgaagctgtaatgatcataaaatgtaaatgcattctgcaaacttcaaataatgtgttttaatggcctaaacccctggtaaagttagcttttagagcagacacaaaataaaattgggtcctgaatactggttggtgcatcatggggtagaggcagaggaagaaagaggggagaggccaggcgcagtggctcacgcctataatcccagcactttgggaggctgaggcaggcagatcacttgaggtcaggagtttcgaggccagcctggccaaaatggtgaaaccctgtctctacaggaaaaaaaaaaatttagctgggcatgatggcaagtgcctgtaatcccagatacgcgggagactgaggcaggagaatcgcttgaacctgggaggcagaggttgcagtgagctgagatgggaccaccgcactccagcctgggtgacagagcgagacgccatctcaaaaaaaaaataaaagaaaaaaaaagaagaaagagggcagaaaaagaatggagcgagatatcattagctcaccactccagctgaaaatcagttcaaagtagagctctgtgccataccagtccccagcgtgggcacttctaattacagtcaatgagcattttgtttgtaagggagaatttttttttttttttttaatagggacagggtctcactctctcgcccaggctggagtgcagcagcatgatcatagctctgcagccttgaactcctgggctcagttgatcctcctgccttagattcctgagtagctgggactactgggactacaggtgcaggtgtgagccaccactcctggccttggggagaatgttaacttctaagtagaacttaaccagaggcaacactcaagaattcccaagagcagcaggcatagtggctcccccatgccagcattttgggaggctgaggccaaggatcccttcagcccaggagttccagatgagcctgggcaacgtaaggagacctcatctctctctctctctctctctctctccctctcttttttttttttttttttttttgagacagggtctcactctgttgcccaggtttggagtacagtggcacggtctcggctcactgcagcctcaacctcttgggttcattgcctcagcctcccgagtagctgggattacaggtgtgcaccaccatgaccagctaatttttgtatttttagtagagacaggctttcaccagcttggccaagctggtctggaactcctgacctcaagtgacccgtctgccttggtctcccaaagtgctgggattacaggtatgagccactgcgcctggccatggatttattattattattttttacttttttatacaaagacagtaaccccaagaggacagaaacctgctcacagctgtatttggcacctaatatgacatctcggaggtattcgaggctaatttgttgaaaagtatgaaagcaggttctgtttttttggctctgttgcccaggctggagtgcagtggcgtaatcttggctcactggaacctctgtctcccaggctcaagtgatcctcccacttcaaccaccccagtagctgggactataggcatgtgccaccacaactggctaattttttattttttggtagagatgggggtcttgctgtgtagtccaagctggtctcaaattcctgggttcaagtgatccgcccatctcagccacccagagtgctgggattatagttatgagcaaccgtgccctgttagcgggttatgttctaacccctgacaatgaacattttccctgctctcctggagtgtatgttttagtcaagaaaggctgaaagcgatcaagagagcaaacaagttcattattaataatcgtgataattgctctgaaggaaacggggcctaaggtcagaaaaccagaatcataatttttgttcttgacccagggccaggcacaatatttcgacgatgccaaaaactcagtgatttacataaattatacatatatatacgatttttttctttttcttctgtcacccaggctggagttgcagtggtgcgatcatagctcactgcagcctagaactccagggctcaagtgatcctcccacttcagcctcctgagtagctaagaccacaggggtgcaccaccacacctggctaattattaattaattaattatttcaatgttttatttaaaaaattatttatatagagatggggtctcactgtgttgcccagactggtctcaacctccagggttgaagccatcctcccacctcagcctcccaaagcgctgatattacaagcataagccactgcactgggcctatataaataatactttaggctgggcacagtggctcacgcctgtaagcccagcactttgggaggccgaggcgggcggatcacctgaggtcgggagtttgagaccagcctgaccaacatgaggaaaccccatttctgctaaaaatacaaaattagccgggcatggtggtgcatgcctgtaatcccagctactcgggaggctgaggcagaagaatcacttgaacccaggaggcagaggttgcggtgagctgagatcgtgccattgcactccagcctgggcaacaagaccaaaactccatgtcaaaaaaaaaaaaaaaattagctgggcatggtggcatgcccctgtagtcccagctactcgggagactgaggcaggaaaatcgcttgaacctgggaggcgaaggttgtggtgagccgagattgagccactgcattccagcctgggcaacacagcaagactctgactcaaaaaaaaataataggccaggcatggtggctcacacctgtagtccccgcattttgggaggccgaggtgggcggatctcttgaggtcaggagtttgagaccaccctggccctcatagtgaaaccccgtttctactaaaaatggaaaaattagccaggcgtggtggtacacgcttgtagtcccagctactcaagaggcggaggcaggagaattgcttgaacctgggaggcagaggttgcagtgagccaagatcacttcactgcactccagcctgggtgacacagcaagacttcatctcaaaaagaaaaataaaaaaaatcaaaataggccgggcaacatggctcacgcctgtaatcccaacactttgagaggctgaggcgggcagatcacaaggtcaggagttcgagaccagcctaaccaacatggtgaaactccggatctactaaaaatacaaaaaaaaatgacaggcatggtggtgcgtgcctgtaatcccagctactcaagaggctgaggcaggagaatcacttgaacccaggagatggaggttgcagtgagccgagattgcatcactgcactccagcctgggcaatagagtgagactgtgtctcaaaaaaaaaaaaaaatcaaaataaatgcaaacagcccatgatgaacaaaatatcaaacttttatataatgacagaactgatattagggtaaggatggcaaggtgagccctgcaatagtttctctgctcccgttgcttaatctgcaaaatgggataaaatgggattgtatctacctttttttgtttttgagacggagtctccctctgttgcccaggttggagtgcagtggcaagatcttggctcactgcaacctccgcctaccgggttcaagcgattctcctgccttagcctcctgagtagctggaattacaggcgcctgtcaccacgcccggctaatatttttgtatttttagtagagacagggtttcacaatgttggtcaggcttgtctcgaactcctgacctcagataatccacccgcctgggccttccaaggtgtgggattacaggcatgagccaccgtgcctggcctagtatctgcctgtttttgtttttgtttttttttttctttttgagacagagtcttgctctgtcgcccaggctggagagcagtggcgtgatcttggctcactgcaacctcagcctcccaggttcaagcaattctccggcctcagcctcccgaatagctgggactccaggcacgtgccaccatgcctggctaattttttgtgtttttagtagagaccgtgtttcatcatgttagccaggatggtttcaatctcctgacctcgtgatctgcctgccttggcctcccagagtgctgggattacaggcatgagccactgcgcccagcttagtatctgccttttaaggctttatgaggatttgtccagaacttcacacaggaagagctcaatacatgcttattactcttttattattttcatcaatattattaatcctacggttgtgtaccacagaacaaatatttaagcaataacatcaaaatttcagaaaactaaatgggctagttactgtattttgtcgaacctaaaacgtcaccatttgtgagattttccattattttatttacttatttatttattctgtagagttggggtctctgtcactatattggccaggctggtctcgagctcctgggctcaagcgatcctcctatcttgacccttcaaagtgctgggattacaggcataaaccactgcatctgggcatgttccattattttacggactattaaataaatgttttcaaataatagcaagatgccattgactgcaaaatacatattgattttagttatattaaaatgtaaaaactaaagtgcactttagaattgataaaatataatatttgggccgggtgcagtggctcatgcctgtaatcccagcactttgggaggccaaggtgggcggatcacttgaggtcaggagttggagacgagcctggccaacaccccgtctctactaaaaatacaaaaatcagctggacatggcggctgagcgcttgtaatcccagctaattgggaggctgaggcagaagaatagcttcaacccgggaggcggaggttgcagtcagctgagatcccaccagggcactccagcatgggcgacacagtgagactccgtctcaaaaaaaaaaaaaagaatattctgagaataagtctacatattgggtgcagcatgcactggggtgacgggtgcactaaaatcacagaagtcaccactaaagagtttatgtaaccccaaaaccacctgtaccccaaaagttattgaaataaaagtttaaaaaattaagctattataggccgggcacgatggctcatgcctgtaatcccagcactttgggaggccaacgcgggcagatcacctgaggtcgggagtttgagaccagcctgaccaacatggagaaaccccatctccactaaaaaaatacaaaattagccgggggtggtggcacatgcgtataatcccggctactccggaggctgaggcaggagaatcacgtgaacacgggaggcggaggttgcggtgagccaagatcgcaccattgcactccagcctgggcaataagagcaaaactccattgcaaaagaaaaaatttttttaaaaaaattaagctattatcattacatatgtttattatactctttgcacataaaagtttatacattttcggccgggcgcggtggctcacacctgtaatcccagcactttgggaggccgaggtgggcggatcacaaggtcaagagatcaagaccatcctggccaacatgatgaaaccccgtctctattaaaagtacaaaaattagctgggcatagtggcacacgcctgtaatcccagctactagggaggctgaggcaggagaatcgcttgaacccgcgaggcagaggttgcagtgagccgggattgtgccactgcactccagcctggcgacagggcgggactccatctcaaaaaaaaaaaaaaaaaagtttatacattttctaacttttattgtacatttcattttatcaacataaaattaacctttggttactaaaaaaaatatattgatagatggcaagcatgcttccaaacggattggacttgttgtagtcaattgatgtttatgatttaaaaaaaaaaaagaaaacaaaacctgttcatttaaacaatcattattatttccaggtattttatgaggaaggggcttacacagacatttctgtaactaataaattatttttctgcttctttagagttaattattcacagttactttgcgtagttacatgagttagctcttcccaacattagtagtatttgttttgttttgttttgtttttggaaaattttcatctaaatcaccgtgggatataatcaccattccacatgttgctttgttcagttgtacagtacctaccttagcctctgtaaaatttggtaaatatcactgctttctggttaagttctgtggaagaaggcagaaaaaaaaattacacctcccatgtcccttgttgaattaagagtacacagacttctctttccccttttttaaaataagtatcgtggcagttgaaaacaggtgctaattcagttcattcacgatatgagaaagatcaatgtacatttgaaactctcttcagagcagaaaattgttaagagttgcgcaaaacagaaagcaggtccttttctaaatatagcaacgtcatatgaccccactggtctttgtactcagagaattaaggtattagacacattgctccacggatgcagcatataattactctggggaagagggactatgaccaacgagcacagatattaatataaatattgggcttgtgtctgtcctttttgatctaaggaaatagacttttgaatgttgctgggacatccccacatgacagcttgtcaactgtgtaaactttcccactgcacacagaaaacagttcttccatctctttggttttatttttataccccttttcacagcagtcaatgtttaaacacttttcaaacagtagacttttttttgtctatttccttctttaactgtgaggtctcaaactgatgctaattcagttttgttggttatcatgatcatttatgatactagatagttctcaatttaggtcccctgtaattaatctctgtgaacgtggtgttttgtttgttttgtttggtaacaactctttacagggtaatttggacatgtatccttaaagcttttagtgctttttaatttttttagtctttatttttaaagaccatttcaagtttactgtgtatctgggagaaattaaagattaaattgggagtgcaatgttcaagagctatcactgcatttaaatgtgtttatctgcaagctaaaattcttaacaccaccattctattttgcaggaggtaagtctttccagccaagcaagggtttgcaaagccgaggttagtcagtaagggccgatacatattaaaattgagaaaaggcctgtccaagcttggggaaaagcagctgttctcacactgctatcagcatttatcaagggggaaatttttgtgttagccctctgggcccacgggagggaaggagtagaaggaagtaactatgatagttgcatatttgaaggaagcagaggcctcagctggttgctaaaaaatcaatttaaaaaataaatgatggagctcaggcatacggcaagttgtggactgagaatttggtttcaggattagggtgtttctacttggaaatttaccatccagttccctggacctgtcttggggcatttttgttgttgttgttgttgttgttttgttttgattttttttgagacagggtctcactgtctcccaggctggagtgcagtggcgcgatcttggctcactgcaacctctacctccctggttcaagtgattctcgtacctcagccgcccaagtagctgggattacaagtatgggccagcacatccggctaacgtttgtatttttagtagagatggggtttcaccatgttggccagattggtctcaaactcctgacctcaggtgatcagcctgcctccacctcctaaactgctgggattataggcgtgagccaccgccccgactttggattgaggatactcattgattagtttcagatgtcccttatgaaatcaatttcttcataaaccttttactccatattgtcttttacaaaaaagagtacatttctgtactattatatacttaaaattatttgttaaactatgtatttttgacaaataaatccaaagactccaaattttaaaaaataacccctcttttcaaaacagccttcccaaagttaaattaaaagttgagttggggctgggcacaatggctcgcgcctgtaatcctagcactttgggaggccaaggacagcggatcacgaggtcaggagttcaagaccagcctggccaatatggtgaaaccccgtctctactaaaaatacaaaaattagctgggcatggcggcgtgtgcctgtagtcccagctacttgggaggctgaggcagaagaatcacttgaacctgggaggcggaggttgcagtgagccaagatcgtgccactgcaccactctagcctgggcaaccagagtgaaactccatctcaaaaaaaaaaaaaaaaagttgagttggtctctatgacctttgcttgtctttaaaaacaaaaaaattaaacaaactgcttttctggaatgtcccttgcaaaacgataaattataactttatcaacttccctagaggccttcaaaacaaaaggaaaaagttaaattaagttcaatcactctattagttcattctaaaaggtaacattccccgaaatatatttttgttcagagtacaacatttagagagccgcggggtgggatgaggtggttcaggcctgtaatcccagcactttgggaggctgaggccagcggatcacctaaggtcaggagttcgagaccagcctggccaacatgaagaaaccctgtccctactaaaaatacaaaaattagccgggtgtggtagcatgcacctgtaatcccagctacttgggaggctgaagcaggaaaattgcttgaacccaggaggcagaggttgcagtgagccgagattgtgtcactgcactccagcctgggcgaccgaggctccatctcaaaataactaattaagtaataaaaaaaccctcaaaataaatatataagtaataaagaaccgcgaacgcagctttcctttttgaatgctgagtgaggatccctggccagagggaaacttgggcagataccagtcacgattcaccaggagcgctccggattcagggttttacttccttaattacagaaccgaaactggctaagtgttgactgatcaagagttaagagtttcgaagttaaggaagcagtaaactcatttccaagagttgtcttcccaaactactccttctcctaatacgtgtaggattttcctagtctaagacagaggtctctctctctctgtctcttgctctctttctttccctttaataaccccaagtatttgatagttcattaatatgaaagagagttttgtagtttccttaataaaatgttgagcacctccagaagggagagaatttcccccaataacattatctatggacattttctgcctttttgtgaaacctccctgaagcttagccctgccttcatttctgattaatcacttgggctcacaagataattcaggaatcacactccaccagcagtgaactatctttaggagatgaattgattaaaactcactgtttgatgacttgggtttgatacggttcagcatttttcgaatacaattagagatatttaaatctttccaataaaaggagaaggtggattttttaaaaatccaccatatgtctctaaatcattttcattttatctaaagaatggggaatttaacatctccagaaatatctggcttccttttttttttttttttaatgtagtcagtaggtcaaaaaaaaaaaaacccacatgtaataggaagtgaacatattatacacgttttaaaaatttgttcatatatatatcatttaaacctgagtcctctaaactttgttcctatagaattttcactgtatattttcacacatatatatttttatatgtttatccatacgtaaatacttacacacagtgaggttattgagaaagtagtcttggaatccagatactaaaaccacaacactttagaattggaaaccatacaattttgtttattccagctctatcattatagaaagggatacttgggctgagagaagttatttagcttgcttgaagatctttgtattctggtcttgaatttgccacataataaatattgcacttaaccttgagggtttctgtctcctcatctgtaaaataggtccactggaagacgatttttaatttagttgaatgtatctgattttgcaaacacgggggttttggagcatgcaaaagaggatgatgttcaggagtccaaatgactagtcagcccaacctttttagccaatggattcatttattttggccctggacaggtattagctgtcctttaaaagattggcttctggcagtttgggtttcccccacacgtttgcttctgtgtatttttatcagccctcgactcagaagaatccaattagagtcaattcctttagtgcaagtggcagcaaatactagactatccagaattgtcagaatcttgtttcctgctttacccagccgtcttgtctccattttacatagttttcagctttgctggaggaataggcctgctgtactttttggaatttcctcagccactcatcatttcaggctgaacattaatgatttatccagcaaaggttattaaaattgactatagtctctgaagaaaggatagtttgtcaaacccacatcttaagactcattggatatattttgcatgaattgtgattaatgcaaggtaatttcagaggatggcttttgctaattaataaatcaatcacattgactcatcttggtagactgaactttaaaagttcattactgacttgctcaaaaccagaatcccacacatacatagtttagtggtttaaggcaattcttaagaaagcaaacagattgagcaatactttaattcagaaacaaattgcttaatctgtgtcctctaaaaataacgtgcctgagaaagaaaaactataaaatacaggcaatacactaacatattcctgcttcttgattgatttcacatatacaacaaagctcacatcattataaaagatttggaaaggtcatatggaaacatcacactaccaatagaaggatttctgaagtagttgaaagcaccaactttacctaaaacaacaaaacaaaacaaaaaatgtaaccaagttgttataaattgtccgctctaaagttctagagatcttatggaataaatgcaggctattattattattattttttgcttctgcccaaagcgaagtttagttatttaaaaagccactggaattgtgctttcaagaaagcaaaaatggcttgtgtttttcatattactttgaaagggacagacatgcccttcaacagaaagcaataagctgccattcaaagaatggagtttccctgcagctaatggcagtgggatctgaatcagataatacacatatgtagaatctttaggaccaaaccacaaaaaaaaaaaaaaaaaaaaaatcaaagcaaagcaaaaagcaaaacaaaacaaaacaaaaaaagaagaagtgtaattcaagtcctgtataaattaaacctacagtaattttctcaaagtgtattttctgttttaggttactagagtattttaaaactttctccatgaacaaataggaatgtccatatacaaaaaaaagtggaacctggattccagccaggaggggtctgcaaccacgtagaacaattggagacttaacaatctgtaatattcgtgttatattctataatattcactgaaatagacctcaatgactttgagctcaggactccatgaatttcttccacatgtgcttcctctggatgatgggggaggcaggggaaagggagagcaaacagctgcttgagatgggagggggcagagaggtgaggaggagaggagcttaggaggactgagatcctcattacctaccctcaatagctgtggcacaataattcttttcttttggaatgcaaatatggtatttatagccaatcaggtcttttgagtggattaacatttagtccttttgatatgggaagaaagaagggggaaggagaaggaagaaagaagaaaagaaatttaaaaaaattaaaagtagggagaaatagattaatcctgacactaatataatgatctggatagctaaactacatcgatgtttctggggtgccaggtataggctaacactttctttttatacttatcccctaaatctccaattaagtaaaccttaccctagctgacactccctcagtttcttcaaatcttttagtcatctttcttgagggcatttaatgtttttcctactttaaattcacgctcttgctaaagaccatctatgtaagataggtgcactattcatggcacaattatgcggttcccagttaaaatgtgataagggaagttatagctggattctcctatgatgtaatgtagtctttgaatgacactttaaacagtcacagcttttctccattgggatccccattctgcccctcaaagctgtgtgatcttgggtacctcttcacacttcagttttgccatctgtaaaatgggtatagcaatggtatcaaaccttaagcggcattacggaggccaaatatgctaatgtgtatgtttggtgtagagtaagccccaaataaagactagccattgttttcgtggccattttttgtctgttgagaaactgttaatgcagcaactttctccgggttagagttggattaactaacaagcttctgaggaaaatattaaaatttcccgtgattttccacagtggctatttaatatatattacatcaagcaagcaggtaaagaaaagcaatactttcaggtgtaaatacagcacctggattgggttgattttggtaattcggtttttttccttagacaaagctaggttttcaagccaaacagtacacagctgtagaaaacagtcacttaaaatttcaaaaggttgctctgtatgtgtaattactattattattattatttcagacagagtcttgctctgtcgcccagactggagtgcagtggtgtgatctcgactcactgcaacgctcaagggattcccatgcctcagcctcctgagtagctcggtgtaaaattacaggcatgtgccaccacgcccggctaatttttgtatttttaatagagatggggtttcgccatgttggctaggctgttctggaactcctaacctcaagtgatccgcccacttcggcctcccaaggtcctgagatgacaggtgtgagccaccttgcccggccccgtatgtgtaattatgtatctacttttattcttgatgttgtttataagtacattccctcttgtttttcttactcattcttaccaatggacttaaacttaattttattggactttacaaagaatgagtgatttttttttttttttttgagacggagaccccgtcgcccagactggggtacagtggcgcaatctcggctcactgcaagctccgcctcccgggttcacgccattctcctgcctcagcttgccgagtagctgggactacaggcgccccgcccggctaattttttgtatttttagtttagacggggtttgtttcaccctgttagccaggatggtctccatctcctgacctcataatcggcccgccttggcctcccaaagtgctgggattacaggcgtgagccaccgcgcccagccgaatcagtgattttactgatcaaaaagtattggttgttttttatttatgtgacaacttccgctcttaagtttatgaattcctttgtatattagattatggaagtgtctttaagaaataaatacaattttaaaatatctatctacaggtaatatccacatctctatgtctatcgatagagaataacatttagggaaacggagaggggagagggagctagaatggaaagggcacctcacagatgatttctcccctaacaaatttttgttttgttttgttttgctttgagattttacttttttgcaagaagaatctatttaggtattagttgaatttttcatcggtcaggtccaaagaacaagggggggtggggaggggacggcgggagagtgtggcagggtgtgggcggggcaggaagaaatgggggcccaccctgaaggctttcttaggtccttttctcagccattttcctccttccccaaccggagaattgccccgcgtgtgcaaggagcggcgtgcctccacgcagcagcaacaacaacagccgcgcgagtggccgcagcgtccacgccgcccgcgagtggccgcagcgtccacgccgccagcgcaaagtcggtgcgcacagcctggcgcgagttcgaagctggagagggctgtaaaatagattggggggcgggggagaccacgtgattttctggaacgctggctcgcctctttattttgattctcgagtaaacttacaatccccaaaatgcgttgagggcatcggaaagagtaaagtcacgttccgctggaaaggatcacttcttaagttcacatgaacctattctttgatcctccttcattgctgcttaagatttacttctctttcaaatcaaataatgtgtttctttctcattctgagaaaagctttcaagatgtgatttcccttttgaaacactttgaagtctttccccagcacatcctttcttaaagggatttggtaagaggagataggcctggaggccagggcattttaaagtcactttccaaataccctgtgttcccttaaagagtcttgaattgaaacatcccagctgctggaagacgtttccaaatgtgactctgtggctgcaacaccctaatgtcttctctcctaggaccctggtgggtcataaagacagacagagcagaaaggaagcctttagttttttaagtaaagccacttccatgggcttcctaaaacaacaaggattctcacatttagttagtcctctctgttaggacatcaagggagaaacagctgaaatccagggctgaacatttcctggcgcggctagatttgaagcttccagtatgtggagtatcaccttcattccctctgggggcgtctatatggtttgtgccaggtgggagcacctgccccgtggtggccaaaaatactgacagcaattcaagcttctcacttccgaatgagatgtttgtacacgaagtgacctttaattgtgtcttagaaactcatgtcagatcaacatgtggtttcacttattcaggagaggttattacatttcaagctgttttgtgttagtttttagcatttaaatgaagtattttctctttcatatatttgatgtggctcaaagaagcttgcttctttttcttttttttccttcatagattttattgtttgattagatctttttgtcaagtcagatcaaagatggcttttcctttctttaggagagagatcttttatgaaaacaaatcaatagaacagatttcacagtaaagaggcattttgtttaaaagattttgaaaagaggaaaaagattacaatgagggtagaagagagatgtttttatttttgtattctatttgtctgtcaaagagttagatgaaagcaaatactttggcattctcaacttcagatttactgtggggaggctttgcagactcagctagatagacacatccttatagaagaattcactttaccttttagcatctgggaatatccgagagctggtggctcctccctacctatccctgctccctcctaagatgatgtagatgctggattcttggctttttggcatctttttcagatgaactccttcacatgcttcaagagaaaatgcaggagtttctagatagcattcatgtttttgtagcaacttttagttccctctatccaggggctaccacagtatattgaaatgatgtgtttacttggtggctatgctgctctttaggggcaggaaagggctggttcaccttgtccctctccctgcttgtcggagctcaacaaatatttgtcaatctgaactgaacaaaggcagaaatgtggtcagtattccctgtgctatttcttttttttcttttctttttcttttttttttttttttgggatggagtttcgctcttgttgcccaggctggagtgcaatggcacgatctctgctcaccgcaacctccacctcctgggttcaagcaattctcctgcctcagcctcccgagtagctgggattacaggcacgcaccactgtgcccagctaattttgtatttttagtagagacagggtttttctccatgttggtcaggctggtctcgaactcccgatctcaggtgatcctcccgcctcagcctcccaatgtgctgggattacaggcatgagccaccgcacccagctccttgtgctattaaaaaaagataattaagattatattgggagtatttggcagtcaccaggtaaataacatctgtaaaacatcatagatggaatatatggatgcctctagacagcacttattatctcactcaatatgtgtttttcttatctgtctctttttttaaaattttttttttttttaattttttgtagagacagtggtttcactgtgttgcccaagctggcctcgaactcctgggtttaagcaatcctcccaccttggcctcccaaagtactggacttacaggtgtgagccactgcacccagccagtacctgtctcttcagcctaaaatgtctgctccatcagggcaggattttgtggtaaacatttagaacaatgcctgagacatagcaatagctcagaagttatttgaagcaatctacacatttcctctttcccatttccgggcatgatgaaggggtaaattaagaacagtcatccaaataattcaagtaaaagacaatcttgaggccgggtgaggtggctcaggcctgtaatcccagcactttgggaggctcaggtgggtggatcacttgaggtcaggagtttaaaaccagcttggccatcatagtgaaaccctgtctctactaaaaatacaaaaaattatctgggcatggtggtgtgcgcctgtaatccctgctactcgggaggctgaggcaggagaatcgcttgaacccaggaggcagaagttgccgtgagccaagatcgtgccaccgcactccagcctgggtgacggatcgagattctatctcaaaaaagagacaatcttaagtgatttgccaatccagaaacctcagttgtgtggttgctacaattctccagttgccttggctgtgagtgaggacttaggcatccagagagtacatcatgtatataatagttgatgcctctccagtgccccaaacagtattatcaatatatcttttgttttgttttgttttgtttttgagacagagtcttgctctgttgcccaggcggagtgcagtggcatgatcttggctcactgcaacctcctgctcccaggttcaagtgattctcctgtctcagcctcccaagtagctgggattacaggtgtgcaccaccacactcagttcaattttctatttttgtagagacagggtttctacaaaacctgtctggccatgttggccaggctggtctggaactactgacctcaagtgatttgcctgccttggcctcccaaagtactgggattacaggtgtgagccactgccccccgcctccaaacaatatattctttattcattcaaataatcaggcaattccatgaaaacaatcaagaaaatgcattgggccgggtgtggtggctcatgcctgtaatcctgcactttgggaggccaaggcaggaggatcactaggtcaagagcttgagaccatcctggccaacatggtgaaacccagtctctactaaaaatacaaaaattagctgggtgtggtggtgcgcgcgcctgtagtcccagctactcaggaggctgagtgaggcaggagaatcgcttgaacccaggaggcggaggttgcagtgagctgggatcccaccactgtactccagcctggtgccggaacgagactccgtctcaaaaaaaaaaaaaaaaaaaaaagcattgatttttgtatcaaagtatcctgaagaattgctgaaacaaaaattttaaagtatgtctttttctctccatttctcctaacacgcttcaaagggtggatgcttaatagaactttcttgacttgaccccagccaaggaaatttaaaaagtcaaagcacttggtgtgtaggatataagctccttagtgcctgaaacccagtgaagtcctgctctctgctgtagcttacacacctggcagaatgcctggcatacagtgggtgttaatgaatgaatcgtgtctgtctcagctactgttttatagattgaactttaggtaccacttcaaatcttgaaaagttctgggagaaatttcccctgcatttacaatgtagtggttgaatggctaaccatttaatttgaacatttaggcggccaccttgtatgcgcaattaagtttccaaccacagttttgcttgttaattacatatggcctctgtaattaacaacatgtgtgaaatacaccaggcttttggtaatagaagaagcaacaaggaaatatatatgtatatttcagagaaatgagcattgaaggaatactgggagtcaaaaacaaaaaaatcaaagcaattagatagtgttttccccttgtttacagccaagggcctctgatagcaggtgtaggctctggtaaaaaaaagaaaaaagatttttttttctcaggccaatgcagtctggccagcctaatttatttactcagtgcattggttagcttttttcaatttttcaaaattttttttctttttttttgtttgagacagagtctcactctgttaccagggctggagtgcagtggcagaatctcggctcactgcaacctctgcctccctagttcaaacgattctcctgcctcagtctcctgagtagctgggactacaggcgctcaccaccacgccaccaccacgcctggctaatttttgtatttttagtagagacggggtttcaccatgttggccaggatagtctccgtctcttgacctcgtgatctgcctgcctcggcctcccaaagtgctgggattacaggcatgagctaacgtgcccggctcttttttttctttttcttttcttttattttaaagcaacaggatcttgctctgtccctcagcctggagtgcattgggcggatcatagctcactgtagcctccaactcttgggattagggattctcctgcctcatcctccaaattagctaggaatacaggcatatttcatcaggcctggcttttttattttttcgtagagacagggtcttgctatgttgcccaggctggtcttaactcctgggctcaaatgatcctcccacctcagcatcccaaactgctggatcacaggcatgagccaccatgtctggctgtattggttagcttttgctgtttaacaaatcacccgaaaagttaatagcttaaagcaacaaccattttttataggccatattcttcttccttttttttttttttttttttgagacggagtctcgctctgtcgcccaggctggagtgcagtggcgggatctcggctcactgcaagctccgcctcccgggttcacgccattctcctgcctcagcctcccaagtagctgggactacaggcgcccgccaccacgcccggctaattttttgtatttttagtagagacggggtttcaccgttttagccgggatggtctcgatttcctgacctcgtgatccgcccgcctcggcctcccaaagtgctgggattacaggcgtgagccaccgcgcccggcctcttccttttttttttgagacagggtctcactctgttgcccaggccagagtggagtggtacgatcatggctcactgcatctttgccctcctgggcctaagccccccaccttggtctcccaagtagctgggaccacaggcatgtgccaccatgccaagctaatcttttttatctttgtagagatggagtctcactatgttgttcgggctggtcttgaactcctgagctcaagtaatcctcccatcttggcctcccaaaatgctgcaattacgggcatgagccactgcacctggcatattctagatttagccagatgagctgatctctactgggctctctcatgtatctgtggtcagcaagtctaggattgccttgctcccgcatccacggattgtcacagatacagatactcaaggggtccttagctgggacaggttgtctctgttctatgtggtcacccatcttctgcctgggtgatacagggtcttgctgtgttgcctgagctggagtgcagtggtgccatcgtggctcacggtagcctcaacctcccaggctcaggaaaatcctcctgccttagccttctaagtagttgggaccacaggcatgcaactaccacatccgctacttttttatttgtagagatgagagtctcactgtgttgcccaggatggtctcaactactggcctcaagtgatcccgccttgacctcccaaagtgctgggattacagcaggtgtgagccaccatgccttccatatatattttttgaagatttctaatgtgaccagaagtacctggaattggatgctcctgatagttgtactttactcacatttcaaatttagcaatagagattataaagaatttttatgtatacacacttgtgcacacataccctacagtctcgggaatgtagattagacccttttttttttttggagatggagtttcactcttattccccaggctggagtgcaatggtgcgatcttggcttacctcaacctccacttcctgggttcaagcaattctcctgcctcagcctcctgagtagctgggattacaggcatgtgccaccacgcccaattaatttttgtatttttagtagagatggggtttctccatgttggtcaggctggtctccaactcccgacctctggtgatccacccgcctcggccttcccaaagtgctgggattacaggcgtgagccaccgcacccagcagactcttgaagtctgtagggaagagaggtgtctcagctaacttgaggtattaagggaatggcatatggcaataataataacaataaccattataccaatagctgggtcaggattgctgcccaagtgatctcatgcaaatccattagccttcctgagccttggttttcacatcttattttcctgtaggacgttagagaactacttgaacactgtttgcacaagcacactttaaactttagtgtattacacatacattagcaattattatgcccagaaagcactggcttttttttgtagctgaacaatgtaaatctattttcagacccaataaaaaaggatacattaaaattattttcttctatggctgggcgcggtggctcacgcctgtaatcccagcactttgggaggctgaggcgggcggatcaccaggtcaggagttcaagaccagcctggccaacacagtgaaaccccgtctctactgaaaatacaaaaaattagccgggcgtagtggtgagcgcctgcactcccagctattcaggaagctgaggcgtggtggccggcgcgtgtaatcccagctacttgggaggctgaggcaggagaatcgcttgaacccgggatgcagaggttgaggtgagccgagattgtgccactgcacaccagcccctgtgacaatgtgaaactccgtctcaaaaaaaaaaaaaaaaattactttcttctgcagtagggattgtccaggcagaacagcaacaacaacaaaagaaaacaaaataataagtttatgattgaaaatcaaatgccttacccaattttaaattccaacttttatttatttttatttatttatttaattttattttattttttgagatagagttcactcttatcgccaaggctggagtgcaatgcaatggtacaatctcggctcactgcaacctctgcctcccgggttcaagcgattctcctgcctcagcctcccaagtagctgggattacaggaatgtgccaccatgcctggctaatttttgtatttttagtagagacggggtttcactacgttggtcaggctggtctcaaactcctgatctcaggttgatccacctgccttggcctcccaatttccagccttttaaaattcacattactttgatgatgatcactgtgtttgagtaaggattgtgggatccttgcctttgtgggctgaatattgtattcacaacattgggcacaaaactgaatacggtgcctggcttctaataggtgcttaagatgtcgttttttggccacgtgcagtggtggctcacgcctctaatcccagcattttgggaggcttgggtggacagatcacttgaggtcaagagttcgagaccagcctggccaacatggtgaaaacccgcctctgctaaaaatacaaaaattagctgggcgtggtggtgtgtgcctgtaatcccagctactcgggaggctgaggcaggaggatcgcctaaacccagaaggcagagtttgcagtgagctgagatcatgccactgcactccagcctgggggacagagtgagaccctgtctcaaaaaaaaagaaagaaagatgtagggtttttttttttagtttttttttttgtttgttttgtttttttttagttttcttaagggggctttctggcaaaaaccagaaagcctgctagacaaattgtaaaagagttgtaacactaagatgtagttgttgaacaataaaataaatgaatgaataaatgaacgaacttctgctgtgggatgttctttttttttttttttctgttgagatggagtctccctctgtcgcccaggctagagtgcagtggtgcgatctcggcttactgcaacctctgcctctcaggttcaagcgattctcctgcctcagcctcccaagtagctgggattacaggcgtgtgccaccatgctcggctaatttttgtgtatttagtagagacgggatttcaccatgttggccacgctggtctcaaactcctgacctcaggtgatccgcctgcctcggcttcccaaagtgctgagattacaggcatgtgccaccgtgcccagcctttgctgtgggatgttctaagtgaatgcataaactttatgttagagaaagccccgcccacatttatagggtttatttccctattgcaggttgttataaacttgtgctcaggagtccttcatctgaagactgaagtccagtctagtgctgagaaccactcccttaccgagagcgagcgcttagcacaacatagccataataatagctgcctaataaccttttcctttctgcctggctcagagctaccttcattaaaagcttttctgggggtttctctttgttccaagacccccttccttgtctctgtgtgggggagctgttctcttctttcttccttctttcttggttgttaaacttttcgctccttaaaaccaaaaaaaaaaaaaaaatgttttcctggcttagagtttgagctcttgggtcagaggatttgggttttaatccctgtcctactgttcactcttgtgtgactttgtgcaactttctttttctttttggcttgcttttgttgttttgttttcttttgagacagggtcttgctctgttgcccaggctggagtgcagtggtgccagctgagctcgctgtaacctctgcctctgggtttcaagtgatcctcccacctcagcctctcaagtatctgggatcacaggatcgtgccaatacgcacggctttctttttcttttttcttttttttttgagacagtctcactctcgcccaggctggagtgcaatggcacaatctcagctcaccgcaacctctgcctcccgggttcaagcaattctcctgcctcagcctcctgagtagctgggattataggcatgtgccaccacgtccgactaattttgtatttttagtagagacggggtttctccatgttggtcaggctgatcttgaactcctgacctcaggtgatctgcccgcctcagcctcccaaagtactgggatataggtgtgagctaccgcgccccgccctgctttcattttttcatctgtaaaataagaaaggtaagccaggcattgtggctcatgcttgtaattccagcattttaggaagccaagatgggaggatcgcttgagcccaggagttcaggatcagcctgggcaacataaggagactccatctccacaaaaataaaaacattagccaggtgtgatggcacacgcctgtggtcccagctacttgggagggtgaggtgggaggactgcttaagcctgggaggtcggggctgcagggagccattattatgccactctgctctcgcctgggcgacagagcaagaccctgtctataaataaataaataaataaataaaggagctagctgggcgtggtagtgtgcgcctgtcatcccagctactcaagaggtttaggtgggaggattacttgagcctgggagttcaagtccagcctggacaacgtggtgagacctcatctcttaaaaattaaaaatcaacaactacaaaaaagagggaggtagtaggacctatttcatggaattattataactataagaatagttatgtttggccagatgtggtggctcatgcctgtaatcctagcactttgggaggccgaggtgcacagatcacaaggtcaggagttcgagagcagcctggccaatatggtgaaaccccatctctactaaaaatacaaaaattagctgggcatggtggcgggcgcctgtcatcccagctactcaggaggctgaggcaggagaattgcttgaacccgggagacggaggttgtagtgagctgagatcatgccactgtactccagcctgggcaacagtgagactctatctcaaaaaaacaaaaaaaaaaaaaaaaaaaagaaagaaaaagaaaaaagaaaagaaaatcttatgtttggataatatttactgagtgcagtcgggcatggtggctcacgcctgtaatcccagcactttgggaggctgaggcgggtggatcacctgaggtcgggagtttgagaccatcctgaccgatatggagaaaccctgtctctactaaaaacacaaaattagccgggcatggtgtcacacgcctgtaatctcagctactcgggaggctgaggcagaagcgcttgaacccaggaggcggaggttgtggtgagccaagatcgtgccattgcactccagcctgggcaacaagagtgaactccgtctcaaaaaaaaaaaaaaatttactgagtgcttgttatggactctgaatgtgtctcctcaaaattcatatgttaaaatctagtccccaatatggtggtgtttggaggtggggcttttggaaggtaataggttatgagggatgatctctcatgaaagggatcagtgtccccttagaagaagaggccacagagttagctaatcctctttccaccatgtaagactacagggagaagtcagctgtgtacaactggtaagacggccatcaccagggcccaaccatactggtgccctgatcttgggaattccagctgtcagaactgagaactacatgttatctaagccacccaatctatggtaatttgttatatgagcctgaactaagacagtgcttattacatgtcagacattttctcattcctaatcatcaccgtagaatccatcaaggtaggtaaattaagtcataaaaatataccccacccaatgcaataaagctctttgcatgactatatatacctttaaaaacattttctttctttctttctttttttttttgagatggagtctcactctgtcacccaggctggagtacagtggcaccatgttggctcactgcaacatttgtctcctgggttcaagtaattatcctgcctcggcctcccgagtagctggaattacaggcgcccaccactacgcttggctaatttttgtatttttagtagagacagggtttcaccatgttggccaagctggtctccaactcctgacctcaggtgatccgcctgctttggcctcccaaagtgctgggattacaggcatgagccactacacccggcctcatcttttatgaattgtcccttacagaaacatctttgcaaaccacttgtttaggagatagtagaataaagtaatggaaaaaatagctgtggattgttaggaaacagtagaatattttaaaaataggataataaaatataggtctttttttttttttttttttgagacggagtcacaagctggagtgcagtggtgcgatctcggctcactgcaacctccgcctccagggttcatgccattctcctgcctcagcctcccgagtagctgggactacaggcgcccaccagcacgcccggctaatttttttgtgtttttagtagagacggggtttcaccgtgttagccaggatggtctcgatctcctgaccttgtgatccgcccgtctcaggctcccaaagtgctgggattacaggagtgagccacctcgcccggccaatataggtcttttttttaattaaaaaaaaaaaaaaaaaaaacaaggatgactcacattttatcctcttgaagaactcagttgttctttgaggagtgactagttccatggtcaataaattcaggaaatataatctccccttgaaactctacaacacgtgttcatatgtaaaatgcactaagaagttctgtaggaaagaaaacagtttgattttctctaacccagcgtgtcctatgctgatttaaccacagaaatttttgttgtagtgtattctacgcctttttaacattgtggaatatagtctggaaaactctaacagattgctgtgtctacaagaaacccaagcaagcatggtacactcatcggaatcagaacgtaacttcacatgaggtgttggttagaatccaagaggcaaggcaggcaagtgaccagctcattcatttttctttttctgtttttttttttgagacagaatctcacactgttgcccagcctggagtgcaatggcttgatctcggctcactgcaacctctgcctctggagttcaagcaattctcttgcctcagcctcctgagtagctgggattacaggcatgcgctgccatgcccagctgatttttgtatttttagtagagacatgatttcaccgtgttggtcaggctggtctcgaaatctcgatctcaggtgatccgccagcctcagcctcccaaagtgctgggattacaggtgagagccaccatgcccggaaatattatttaattgagaaagttatttattcagtttttctatttacactttcttggtttttttctcatgcccactctgcactcaagttttctctctgtattatttatttatgctttattattaaaatttataaatagaggtgggggtcttgctacattgaccaggctgatctcaaatccctggccttaagtaatcctcccacctcagtccctttcaaagtgttgggattacaggcatgagccaccactcgaggccaagttgcttctctgcttcatatgttcccaactcttctgaaaagagattttgctattgtctaaaccacttgtgttcagctttaaagagaagtacaaagagacttgaagtcatctgagagtctaccacatagaaaagagcatccttaactcttggtgaacatcgttttaggcttctcttacacagtaattttacataaatacaattaaactacaaattctgtgcaatatgtcatagactttttttttttttccgagacggagtctcgctctgttgcccaggctggagtgcagtggtgcaatcccagctcactgcaacctctgcctcccgggttcaagcgattcttctgcctcagcttcctgaggagctgggactacaggcgcctgccaccacgcccagctaatttttgtatattcagtagagatggggtttcaccatattggccagtctggttacaaactcctgacttcgtgatccgcccacctcggcctcccaaaatgctgggattacaggcgtgagccactgagcctggccggtcatagacttttttctgcaataataaacataaattaacattatctttgttaatggatgggccatagtttatgcaaccctttgacagctttttggtttgtttgtttttttgttttttgagacggcgtctcacctttttgcccaagctggagtgcagtggcacgattttggctcgttgcaacctcagcctcctgggttcaagtgagagtagctgggattacaggcaactgccactgcgcccggctaatttttgtatttttagtagagacagggtttcgccatgttggccaggctggcctcaaactcctgacctcaggtgatccggcccacctcggcctcccaaagtgttgggattacaggcgtgagcccccgcccccagccttttttatgttttatgtatattttttgagaccgagtcttactctgtcacccaggctggagtgcagtggcgtgatttcagctcactgcaacctccgcctcccggattcgagaggttctcctgcctcagcctcctgagcagctgggaatacaggcatgcaccacccccccagccaatttttgtattcttggtagatgcggggtttctccatgttggtcaggctggtcttgaactcctgacctcaggtgatccacccacctaggcctaccaaaatgttgggattacaggtgtgaaccaccgcgcccagccccctttgacagcttttgagggacatttagtttctttgcaatttataattattcttaattgagccttgtgcaaacaccctagtgtgtccagactttaacatttgagagatgtggccgggcgcagtggctcacgcctgtaatcccagcactttgggaggccgaggccagcggatcacgaggtcaggagatcaagactgtcctggctaacacggtgaaaccccgtctttactaaaaatacaaaaaattagccaggcatggtggcgggcgcctgtagtcccagctactcaggaggctgaggcaggagaatggcgtgaacccgggaggcggagcttgcagtcagccgcgatagcgtcactgcactccagcctgggcaacagagcgagactccgtctcaaaaacaaaacaaaacaaaacaagaaaaccttttgagagatgctctccttttttttttttttaatgccttttctcactttgtggtccaggcgggggtgcagtggcgccatctctgcttgatttctgcttgatgtaacctccgcctctcaggctcaagtgattcttgtgcctcagcctcccaggtagctgggattacaggcgtgtgtcaccatgcctggctaatttttgtatttttagtaaagacggggtttcacccggttggccaggctggtcttgaactcctgacctcaggttgaccagcctgcttcagcttcctaaaatgctgggattacaggcgtgagtcattgcactcggcctctccttaaggtaaatccctaaaggtaatatatatctgcatcaaagcgaacctctgttattttttgttttatattgcctaactgccttttggaaaggttataccaaattacccttattctgaatgtgcaagaaacttttatttttattttaaaattttatttatttatttattttgagatagagtctcgctttgtcacccaggctggagtgcagtggcgcaatctcggctcactgcaacctctgcctcccaggttcaagtgattctcctgcctcagcctcctgagtagctgtgattacaggtgcccgccaccacgcccggctaatttttttgtatttttaatagagacagggttccaccatattggccaggctggtctcgagctcctgaccttgtcatccacccgcctctgcctcccaaagtgctgagattacaggcatgagccaccgcgcctggtgttaacttttattttttttgagacaggatcttactctgtcactcaggctagagtgcagtgataccatcatggctcactgcaacctctgcctcccaggctcaagcattcctcccacttcagcctcccaagtagctgggactacaggtgcacaccaccacgcccagttaatttttgtattttttgtagagatgcgtttcctcattttacccagtcttgtctagaactcctgggcttgagtgatctgctctcttcagcctcccaaagtgctgggattataggtgtgagccactgtgcccagcctgatacctgtacttttactttctttcttttttttttttttgagatggagtctcgctctgtagcccacgttggagtgcagtggcgcaatcttggctcactgcaacctccgcctcccgggttcatgccattctcttgcctcagcctccagagtacctgagattacagtcacacgccaccacacctggctaatttttgtatttttagtggagacgggggtttcgccatgttggccaggctggccttgaactcctgacctcaggtgatctgcacatcttggcctcccaaagtgctgggattacaggcataagccacagtgcccggtccatatctgcaatttttaaccatttatgagatcacttcactatcttgagatctccactttaatgtattcaaggaaaaatgcttagttgtattgtgaaatggatcactttagagaaaagaaaaatgcctacaatacagtgagctggtcaattttccaatgccaaaagataaacgtgaatatccctttcagggaattagccaatgtttcaagcagcatgaaggcaaaatttgagttgaacattgtaatacaaatagctcttgggaaattcttatgagtacctttaaatagatgtaaatctattaaatcaaagatttaattacttagtatataataagcaacccactattaataatataagaggtaatactgcctttcaaatttttccctttcaaattcttggaattattaactatgtatgccccaaataatgggtttctgatggtgtatttccccctggaaaagagcattctatgcaatgcccagttcccagtacatagtagacattcaattaaaaaaaaaaaagttgaggccgggtgtggtggttcacacctgtaatcctgccgctttgggaggctgaggtggatggatcacatgagaccaggagttcaagactggcctgtccaacatggcgaaaacccgtctctactaaaattacaaaaagtagccgggtgcagtggcgcacgcctgtaatcccagctacctcaggaggcttaagcacgataattgcttgaatctaggaggcagaggttacagtgaattaagatcctggcactgaactccactgcactccagcctgggagacagagggagactctgtttcaaaaaaaaaaaaaaaaaaaaaagttgaatgaataaatggcatattacaaagttaaaaagtaaagcgtctgtcttatcagtcagtttatctaatcagccagttgttcagaagctattaataggtaactgatggtgtaagtccagtgtgttttaaataatccttttctggacttttatgttcttcctaaggagagataggaaactggtggacaagtgttgggtttgctacagtcatgttttctttggctcagatggtattcaaacattttgaaatagtcaccaacatttctaaagcttctacataaaaattgggatttctggctttccttaacaaaatgtgagctctggccacaccaggtccaaactccaagccgcaaggccatagaagggctgtgggcaagggacacctgccccctccccctttgattgccgcggcccccgcctggtggccggcctctcttttgccacctgcctggccccgggaaggcattttgactttgccacagcctgtttctctttttaagtttggtgtgtgtacattgaagatcttatattattgcctcaattcaaaaaaatgttcttgctctctctctcccaaattttcaagacctcactgctcctgaaccttctgtgatggcctgggctttgttctttgtcgtcaccagagagagtagcaggaacaactctctagagagacccatctctcagccgactccactgtaggttggtggcaatcaaagacatcggaatactttctcctgtgtgtgcggggtgggggaagggaaggttgagagaaaggaagaagcataaagattaggagggctgttgctcaaccttcctgttctgggccaatcgtgcctgtcagaccagctacagaaagacatgcacttgtagtatgtttttttgggggaaaaagtatcttgattctactctgctttgagaaaaaaaaaatactgttaactctctttctctgtataattagacatcaaaatacagagaaatgttcttagcactttgctatcagaaaagcagacattttcgactttgtagattccatacaagataaacgccttgacccttgctccccatccccaaataaaatgccaaacttcaattaccagttcgtaagtagtctgcatcgctttatttttccttctgacagtaggtgtttggtgtcaatgtacattttcttaccacaatgatttccttccctaaactattaattttgtttttatgaataatacagtatgccccagttattatttagtttgattgtatgctagcctcatgctctgcattttaatttaagtgtaactgcgcaggaaaaaaatgcaaatctcttctattcaaattcaaaagaaaataaatggattttttatggcctaaaggatctattcattaccaaatcatttatcttttcaggaagaacagtttatgtatccaatatgctctcgtgctgtctttattttctttattttttttctcttttgataaatatgctcactctttcaagtctctcttgaatctctgccgataggggcagcttatagcagcaagaacaagaatataattaatagcattaaacagaaagcaaaggttgcagagaaagcttgaacatattggatattttaaaaataataataaacaaacctaaaattggattgtgtcaaatgaatttttattttaacaattgtaacattaagaaaaagagatacacagttggccctaccaaaacaaaatgacaaaggggtgggaggagaagtccgtgttttcaacagactagcttttttggggtcttgttgcaaatagcctgaagaggtagaagcattactgattttgcttctaacatgatcggctcttggaagtttggcattttgaattctgggctatattttttttatttttatttatatcttgattaaataagccagtttagaggtcactgcatctgggagggtgtcgtaatacacaaacagctgtgatacacaaagcagttttcagtaagtatctttcatgtagcagctggaatggctttctcctgaatgagaaaggcccctaagtgagaatagtggcaagtgtgagtttatgtatgtcatttttttaaaaagacatttgtctttttctagagtactgtactttaaaaatcatataattgtgttaaagttacccagaatgttgacttttccctattcatgtttatgtatcaaattggatttcagggcaaattcaatgggtttctttgttctttctagattaagtccagataaataatctggtttcgttgtggctgcattgtttaaatcatgctaattatagtgcttacaatacaatggcagagggggcaatttaaatgttcatttgaagaagaaaaaaatctgatgctgagctcaaaaatgtacagtcactctaaccgctccctgagggccattttaagactggttttcaaagacttgtttaccttgaaattcttacacaccaggcatgcttctatcctcacgacctaggtacgggaatgttagtggtctctaagctgacttggagtctcatgtagatagagttctgatttcagaacaggctgctggctgcttccatgcccctcagaaggagcagggagtcctccccggccacagacttgtagccctttttgactgaaggcttccaaaatgaaaggaaggggttggcttttgaagaggtgaaagagagatcctttgagggaaggactgaatgaatgagcagcctcaggccagggcgagataatcaagagactatctgacctctaattccttcagagacaaaaataaatcagtgctcaaggaggcgcttttattaatcactgcatgtttcctgtcagaagaaatgatgggattagggtgggaagagaatacacgggacatataagcaaatgtttacctaggctacttctttctggatccttgggattggttcttaacttgttttttcttgagacagtcttgctctgtcacccaggctggagtgcagagacatgatctcagctcactgcaacctccgcctcccaggttaaagggattctcctgcctcagcctcccaagtagctgggattataggcgcccgccaccacgcctggctaatttttgtatttttagtagagacagggtttcaccatcttggccaggctggtctcgaacacatgacctcaagtgatccgctcactttgacctcccgaagtgctaggattacaggagtgaggcactggcctggctcttaacttcaattgttctctattttatgatttatgatttatttgggaaattcctgaggtgggggcaaagggacacgtctaggtcttggcaccgagaactgaaacaaatagcacattagactatatttagcagatgataatacagacactgaaaaacagattacggatgataaaaaagaaagaaatagtgccgtcctggcttgaaagcgatggaatactgaatgtgaggcgtggattgtttagggaatgagtgtggaatttctctccataaatcacccattgctcaggggctagatgactataggaggtggggacacaaatatatcacctcttgaggaaggaaagagaagagactagatgagaatcacaacgccaatgccaaggttggtgttgtgtcgaaaacagtaatacggacaatagattttgcagaaaaaaagaatcgggagccggtgtggtggctcacgcctgtaatcccagcactttgggaggccaaggtgggcagatcacctgaggtcaggagttggagaccagcctgaccaacatggtgaaaccccatctctactacaaatacaaaaattagccgggcttggtggcaggcccctgtaatcccagctactcaggagggtgagacaagagaatcgtttgagcccgtgagggggaggttgcagtgagccgagatcgtgccactgcactccagcctgggtgacagagccagattctgtctcaaaaaataataataataattgggaaaaaaataaataattgggagtggacttttgctttgcccccatttccaggaattgtgcatgactcaaagttactgctttgagtagcccaactacagttgttgggctgatctgctcactctttaagaccctggacaaattcatcaagcttttgctttgcacccctgttccctcagctataaaatgggtttaataagaattcattccggccgggtgtgatggctcacagctgttatcccagcattttgggaggccgaggcgggtggatcaactgaggtcgggagtttgagaccagcctaaccaacatggaaaaaccccgtctctactaaaaatacaaaattagccgggcgtggtggcacatgcctgtaatcttagctactctgaaggctgaggcaggagaatcgtttgaacctgggatgcggaggttgcggtgagtggatattgcgccattgcactgcagcccgggcaacaagagcgaaactccgtctcaaaaacaacaaaaaaaaagaattcattccatttggttgttgcaaagataacaggcgataatgtacatagaacgtttagctacacctggctaaagctaggtcttagataacaagaatgagactgggcatagtatctcatgcctataatcccagtgctttgggaggccaaggcaggaagattgttagagaccaggagttcaaggccagcctgggcaacatagtgagaccctgtctctacaaaaaaataaaaataaaaaaaagataatgaaaacacaccaaatttgtagaaataccagaaaatcttattttagttattcctttttggcttctttttgttttgttttgtgtgcagtggcacaatcattgcttaactgcagctgcgacctcctgggctcagcctcacaagtaggtgggaccacaggtgcgtgacatgcctggctaatttttttttttttttctgagacagagtctcgctctattgcccagtctggagtgcagtgatgcaatcttggctcactgcagcctctgcttcccaggttcaagtgattctcttgcttcagcctcctgaatagctgggatcaccggtgcacaccaccacgcctggctaatttttgtatttttagtagagactgggctttggcatgttggccaggctggtcttgaactcctaacctcaagcaatttgcctgcctcagcctcccaaagtgctgggattataggcatgagccattgtgcccagccgaaaagagttacttttataaaaaaactattgcaggctgggcaatatagtgagaccccatctctataaaaactaaagaaaattagctgaacatggtggcatgtacctgtcgtcccagctacttcagcctgggtgacagagtaaggttctgtccccaaaaatatatatactgttgtttgcttctttatatacttgtatgataaaggccataccatataatttaagagctgcaaagttttctttactgttcttttacagattggcttgaagttgtacaaaattaaacacaagaaatacatgtggccaggcacagtggctcatgcctgtaatcccagcactttaggaggctggggtgggcaaattgattgagctcgggagttcgacaccagcctgggcaacatggtaaaaccccgtctctactaaaaatacaaaaattagtctgggtgcggtggcttacggttgtaatcccagcactttgggaggctgaggtgggcagatcacgtggttaggagtttgagaccagtctgactaacatggtgaaaccccgtctctactaaaaatacaaaaattagctgggcatggtggcgtgcacctgtaatcccagctatttgggagactgaggcaggagaatcgcttgaacctgggaggtagaggttgcagtaagccgagattgtgccactgcactgcagcctgggtgacagagcaagactctatctcaaaaaaaaaaaaaaaagcaggaaaaaaacaaacaaaaaacaatgaaaattagcagggcctggtggtgcacacctgtaattccagctacttgggaggctgaggcatgagaatcccttgaacctgggaggtggaggttgtagtgagtcaagatggagccactgcattccagcctggatgacagagcaagactccgtctcaaaaaattaaaaaaaaaaaaaagagatctaacagaagttgagactcacagtatacctagcacgcttctcagtgattagcttatttaatccccagaacagcttagtgaaggaggcattatttattattcccatttcacagatgagaaaacagaggcttaacaatatgaagtgaccatgtaaattcccatggcagtgacagtggagctgggatttgaatgttagcagccttgatgcttaactcgatttttctttcttctgttttcttaccacagtactaaggagggacttaatgccatttgttccctacccacttggcattcattcctacctgcctttgctaactggcattactgattgtccactagatgcaacacctatgctaaacaatggggaacacaaagatcttagggatttttttttttttttgagacggagtctcgctctgttgcccaggctggtgtgcagttgcgtgatctcggctcactgcaagctccgtctcctgggttcaggccattctcctgcctcagcctcccgagtagctgggactacagtcgcccaccaccacgcccagctaattttttgtatttttagtagagacggggttttaccgtgttggccaggatggtctcgatctcctgtcctcgtgatctgcctgccttggcctcccaaagtgctgggattacaggcatgagccaccgtgcccggctgatcttagggattaactgattgattgattgactgatttatcttttttcaaccctggcctacagaagatctttggaattcacataaggtttttcttgggccgggcatggtggctcacgcctgtaatcccagcactttgagaggccaaggtgggtggatcacctgaggtcaggagttcaagaccagcctggccaacatggtgaagccctgtgtctactaaaaatacaaaaattagcggggtgtggtggtgggcgcctgtaatcccagctacttgggaggctgaggcagaagaggtggaggttgcagtgagccaagatcacaccactgcactccaacctgggtgacagagagagaccctgactcaaaaataaataaataaataaatatatacgatttttttttttttggaggcagggccttgctggatcacccaggctagagtgcaggcacaatctcggctcattgcaacccccgcttcccaggctcaagacatctcccacctcagcctcctgagtagctgggactacaggcacgtgccaccacacctggctaattttttgtatttttggtagagacgggggtctcactatggtatccaggctggtctcaaactcctgagctcaagtgatcatcccgcctcagcctccccaagtgctggaattacaggcgtgagtcccctccctcggtcgattttaggaatgtaaaggctggtagagcacttccaactccctgtgtttggattcacggattcttcatggagcatttccccaggaaaagacacacaaacagattaggtgcacaattacaggggtttcattaatattctccaagtttatttatggattccctagacttccaagataagggcacttggttttacagcataatccccatattttatcacccataggttcacaggattgggtgacttgttcaggagacttagtgaagtgttgttcgtttaatgtctacgctaagtgagtaaatgtatggtcctcagtattctcaaccctaagttacggaattgctagacacagggccagcttcatgggtgtatgtcttgggcagcagttgcttagggctctgtgctcggaagcagcccgtctcgaatgtctgggctcaagcagtcttccctcctcagcctcccaaagtgctgggactgcgcgcatgcactactgcaccctgccactttgaaatttttaataactttttgaacaagaagccatgtgttttcattttgcactggaccttacaaattatgtagctggcccttattagacattgtgacacctaagagagaccaccccctgggaggactgaacacttgaaaaaataatatttattgagcaggtattaattcatttaaccttcacaatgacccggtgtggcaggttctaattttacccacattttacagatgaggaaagcattctgtaaatgcagtcaattcttgaaatgtctagtgttgcttagtaattagagggccttacttatgaccaagaagtttacaattttgcctatttgcatacattctccatctattttaaacaaacaagagccaaaaaacaaaacaaaacaagcaacaacaacaacaaaacaagaaaaagttgagccccagctgtgcagatttctttctgaaaacactgggttattatattgagtattttagtactaatttagaaagtattttgatcttgattcgtctactgatcatgtcagaatccaactctgaataatactgaacgtgattagagtccccagaactgagccagactgggtctgcagaaagttcttacagctaccaaagatggcttgatatgtgtctggtgggggtagggaggagagtgtggcctgtggttcctcacagcggggagcaagtggcctgtgggtggaagaaactgtcacttcacctgcagctgggggcacccatcttattcattacaaggtctgaggaagctggtttaccaggtcagaattcagaaacgtggatttcacctttaccagctactcagccctaaggcagttcacaatctgagtaaccatgggctgctgaattgtgattgtttaaaaacaggccgggctcagtggctcatgcctgtaatcccagcactttgggaggctgaggtgggtggatcacgaggtcaggagatcgagatcatctgggtaacatagtgaaaccctgtctctactgaaaaaaaaaaaatacaaaaattggctgggtgtggtggtgcgtgcctgtaatcccaagctactcgggaggctgaggcaggagaatcgcatgaacccaggaggcagaggttgcagtgagctgagattgtgttactgcactccagcctggcaacaaagctagactccgtctcaaaaaatataaataaataaataaaaataatatggcccagcctgggcaccgtggctcacgcctgtattcctagcactttgggaggccaaggtgggtggatagcctgaggtcaggagtttgagaccagcctggttggtgaaacctcgtctatattaaaaaaatacaaaaaattagctgggcatggtggcgggcgcctgtaatcccagctactcgggaggctgaggcaggagaatcgcttgaatccaggaggtggaggttgcagtgagccgagattgtgccactgtactccaacctgggcaacaagagcaaaactctgtctcaaaaaatatataataataataataataataatatggctgggtgtggtggctcacgcctgtaatcccagcactttgggaggctgaggcgggtggatcacctgaggtcaggagtttgagaccagcctccaacatggtgaaactccatctctactaaaaacacaaaaaaattagccaggcgtagtggtgcacgcctgtaatcccagctactcaggaggctgagaaaggagaatcacttaaacccagaaggcggaggttgcagtgagctgagatcgtgccattgcactgcagcctgggcgaggagcgaaactctatctcaaaaaaaataaataaataaaataaaaataatatggattgctaactcaaaagagaactgaaagttttttctcttcgcactaaataaaacctcccaaactgtggggcctttagatgctaaaagaaatgctagattttctaattagtcttctctaataaaatacttttacagttttctgtgccaactggtatattattcccataattatttgattaaaaaggaatgaagttctttgaaaaccatattatggtaatattagaactgaaattatacttgtcatttcatactattgcctatggagtttttgatctttctcattatgccgatttgtgagatttctttttctttctgtgggaaaaccctgtggacttctcttcttccctcccgcccttctttccttcctcccttccttctttccttccaaaagaaatgaactggtttattattttgtaggatatgcattatttcctatataattttgggacaagctggtttcctttcatgagtaatttattaatacactgtatttaaaaaatctaaatataggggtgtggggatgggaaaaaaagaaaaaactaaatattataattgagcctgattgcatgatatgtattcatgtatttcagcctaaacatgaaaataaatacccaagtttctttttaaacacccagtatttaaaagtgctaggctctgcaacaggcgctgtaaatattgagctgatgaaaaccagtttaaacaattattgctttattttaaacatttattgaggttctatgctaagaacctctagattctctgaattttttttctactttaaaaaatagagacgggatctcactacgttgcccaggctggtcttgaactcctgggctcagtgattctcccaccttggcctcccagagtgctaggattaaaggcatgggccaccatacccagcctagattgtctcatttaatccagagaaacatgcaaggagatgatattattatccatgtattactcatgagaaacacccagagagattaagtaacttgtccaaggacacacagctattgaatggtggtgctgattataaaactagatctgtctgattgcaaatcaagatcacttataactgttgggtgtggtggctcacacatataatcccagcactttgggaggctgaggtgggaaaattggcttgaagccaagagtaccaaaccagcctggtcaacatatcaagactgtttctacaggccgggcgcggtggctcacgcctgtaatcccagcactttgggaggctgaggcgggcggatcacgaggtcaggagatcatcaagaccatcctagctaacacggtgaaaccccgtctctactaaaaatacaaaaaattagccgggcgtggtggcgggcgcctgtagtcccagctactcgggagcgtgaggcaggagaatggcgtgaacctgggaggcggagcttgcagtgagccaagatcgcgccactgcactccagcctgggcgacagagcaagactccgtctcaaaaaaaaaaaaaaaagaaaaaaagactgtctctacaaaaatagaaaaacagaaaaattaactgtgcatcatggtgtgcacctgtattcccagctattggggaggcagaggctagaggattgcttgagcccagaagtttgaggctgtagtgagctgtggtgacatcactgcactccagcctgagcgacagagagaaggaaaaaaaaccaaaaaaccaagcacttacaacttactttcattctaggagtcctatttagttgaattgagaagaaaaccaagagggttaaggcattcacagggcttagtgccttatttgtcttatgtgactcacatctgttcccgtctctcaaataaaactaaaagtgtgacaccttttgatttgattcagtttattttggtttccaaataaaacaagactcacttgcttctttttgttgttgttgtttttgttgttttgagaccgagtcttgctctgtcacccaggctgtagtgcagtggtgcgatcttgactcactgcaaccttcgccttctgggttcaagcaattctcctgcgtcagtcagcctcctgagcagctaggactacaggtgcgtaccaccacgcccagctgatttttgtatttttagtagagacagggtttcaccatattggtcaggctggtctcaaactcctgacctcgtgatccacctgcctcggcctcccaaagtgctgggattataggtgtgagccaccacgcctggcagtttgtttttttttttaggtggagttttgctcttgttgctcaggctggagtgcaatggcacgatcttggcacaccgcaacttctgcctcctgggttcaagtaagtctcctgcctcagcctcccgagtagctgtgccaccacatccagctaatttttttttttttttttttttgagacagagtctcgttctgtcaccaggctggagtgcagtggcaccatctcggctcattgcaacctctgtgtcccaggatcaagtgattctcctgcctcagcctcccgagtagctggaactacaggcacgaaccaccacgcccagctaatttttgtatttttagtagagacagggtttcaccatgttggccaggatggtctcgatctcttgagcttgtgatccgcccgccttagcctcccaaagtgctgggattataggcgtgagccactgcgccaggccaaattttgtatttttaatagagacggggtttctccatgttagtcaggctggtcttgaactcctgacctcaggtgatccaccctcctcggcctcccaaagtgctgggattacaggcataagccaccacacctggcttttattattattattattttgagatggagtcttgctctgtcgcccaggctggaatgcagtggcatgatcttggctcattgcaacctccgcctcccagattcaagtgattctcgtgcctcagcctcccaagtagccgggactacaggtacgtaccatcacgcccagctaatttttgtatttttagtacagatagggtttcaccatgttggtcgggctggtctcaaactcctgagctcaagtgatccacctaccttggcctcccaaagtgctgggattacaggcgtgagccaatatgcccagctttgcttctaagcatttaaactctggagctagactgtgtgtgtttgaatctcaactctgcccctaacaaatcatgtggatgtgtacaggttgtttcactttcctgagactcagtttcccagtccagaaaatcgggataatgatagtggcccacttaaaaatgttatggggatcaaatgagatctaggtaaaacacaggcagaaactggggtctgccttattaagcttaatagctttgcctgatgattaaattttctttttttcttatttatttttttggtgatgattgaattttttttttaagttgacaaatttaaccattaggaaaaacatttttttcaaaaaggccctatatgggcgcagtggctcacccctgtatcccagcactttgggaagctgagaagggcggatcatgaggtcaggagattgagatcatcctggctaatacggtgaaaacctgtctctactaaaaaaatacaaaaaattagccgggcatggtggcacacacctgtagtcccagcttcttgggagtctgagacaggagaatcacttgaacccgggaggtggagtttgcagtgaactgagatcacaccactgcactccagcctgggtgacagagcgagaccatctcaaaaagaaaaaaaaaaaaggccctagatttctggcttctaaaacttcatactttttgaaattgaaaaaagagctggactttaaagaatgaattggaggaaaaaaaaaattcaaggtgaatagatggggaaaaagtgagccagcatgaggaaaacatgcagatgtctttaggtaagatcaagtagcgccaggcgtggtcgctcacgcctataattccagtgccttgggaggctgaggcaggaggatcacttgagcccaggagtctgagaccagcttggtcaacatagtgagacttcatctctacaaaaaagaaaaaaaaaattagctggacatgatggcaggaggatcacttgagcccaggaattcaagccatgattgtactgctgcactccagcctgggtgacagagcgagaccctgtctcaaaaagaaaaaaacacaaaacaccagtttactcaggcagcagatagattgtatctatcagggagatagattgtataagcacaggagtggaagccaagggtccagtgtggaagctcctgcaattatcaactgtaggaggttagattggaggggtgtccgtagggaagatgaagcgggtgaacagttttgagagattcttgggcagcaaaattggcaggacaggttgatggtttagacaagcaaggcgaggaggaaggaggtatcacggctgactcatagtgtttttaaccagggaagcaggaaaaactggaagaagagacgctattaaattatgtaggtaagaggtcctgaagatgctgagtcaatgacagtaggactggcaggaggactccagggcactgcagggatataatcaatagggtttggcagctgatcggccattgggagaaggctttatgggacagggaaggatctagaaggacttcagccccaagcaggggttgctgtttttgtcttgaatatgtagagtgggattatgaagctgtgtcacatgaaataccctcaaatctgtccatttatacatacatgagctggtctgtgaatggttggagggaagcagctcaaaaagggaagagtagagtttttcagcctcaacaaggtatgatcattagagttaaagggaaaaaagactttgttaatgaacccatcagagacactttggaacctactgcagccatagaaactgacctggaggccgggcgcggtggctcacgcctgtaatcccagtactttgggaggctgagatgggtggatcacctgagatcaggagttcgagaccagcctggccaacatggtgaaaccccatctgtactaaaaaatacaaaaattagctgagagtggtggcaggtgcctgtaatcccagccactcggaaggctgaggcaggagaatcgcttgaacccaggagatgaaggttgcagtgagccgagatcacgccactgcactcttgcctgggcgacagagcaagactgtctcaaaaacaaacaaaaaaacaaaggcccttaccgtagcctctgactctctcattatattattaccattggagcacttttcatccctttcaggattaacctgtcttagctgtatgtgttacctggtttatacctgtgtctctcctgctcgagtgtcacctctgtcagggccatgtccccccgcccagccacccgcctcgttcaatcccatttgctgctgtatgtccagctgtgatggcactgcctgacacttagtaggtgcttgaaacatgttttttgaagtggattggcttaagccaccctgaatgctaaacgctagtatttgggtgcaccatagtgaccgttctcctagggaaagcttttcacacattcaaatctgttgctacaggcagcgttcgtgcacacacaaacagatccaagtaagcggtggctgcaacccagtcctgagtcaatgggtttggcaggacagcaattagccacacattctgaggaagtggagcatcaatcatccaactccttttaaggcatgagttagctgtatacttttgaaattagctttatggaggcataagaatgatatcatggactttggggactcaggggaaagagtgggagggggttgagggataaaagactacccactggttgtagtgtacacggctcaagggatgtggccaccaaaatctcagaaatcaccactaaagaattttctatgcaacaaaacaccacccgttccccaaaaactagttaaaaaaataaaagattgttgggattaacagaaaaaaataagataaaattatcgttattgaaatataattctcatgccgtatgacccactaatttaaagtgtacaaacgcaatgatttttagcatgttcagagtcgtgcgaccatcactgctatctcactccgaacattttcctcaccccaaaaggaaaccccttattcattaacactctcctcccatttcccctccaaccctaggaaaccacgaatctactttctgtttctttcaatttgcctattctgcacattgtgtataagtgaaattatgcagtttgtggccctttgtgtcggtcttcattcactaaacataatgttttcttttgttgttgttttgagacagagtttcgctcttgttgcccaggctggagtgcaatggggtgatctccgttcactgcaacctccgcctcctgggttcaagcaattctcctacctcagcctcccaggtagctgggattacaggcacccgccaccacatacggctaattttttgtatttagtagagactgggtttcactgtgttggtcaagctggtctcgaactcctgacctcaggtgatccacctgcctcggcctcccaaagtgctaagattattggtgtgagccaccgcgcctggccacgtaatggtttcaaagttcatccatgttgtagcatgtatgagtactttattcctttttattgctaaataattttccattttacatattgattcttctgttgatggacatttgggttttttccatttcttggctactatgaatatatatatatatatatatatatttttttttttttttttttttttttttttttgagatggagtctcactctgttgcccaggctggagtgcagtggcatgatcgtggctcactgcaacctctactgcccaggttcaagtgattctcctgcctcagcctcccgagtagctgggattacaggcacctgccagtgcgcttggctaatttttgtagtttttagtagagatggggtttcaccatcttggcaaactcttgacctcgtgatccacctgcctcagcctcccagtgtgctgggattacaggcgtgagccaccgtgcccggccaaatttgtttttttttgttgtttttttgttttttttgtttttgagacggagtcttgcactgttgcccaggctggagtgcagtggcgcgatctctgcttactgcaagctctgcctcctgggttcaggccattctcctgcctcagcctcctgagtagccaggactacaggtatgcaccaccatgcctggctaattttgtatttttggtgggactgggttttgccatgttggccaggatggtctccaactatcgacctcaggtgatccacccaccttggcctcccaaagtgctgggattacaggcacgagccaccgcgcccagcactgtgctaatatgttttaaacaactttctaatacttgcagacctttctttggaaccaagagagctggtctctccttcatcagggccttcggcaggcaatgctacctggctagaagttagctttttttttttttctttggcatatttttcagcggttaccttctgtttatggaaaatgatattgatttttcatttacagaggtgatacagtttctttttttggccttgattcatcacctcttaacagtttcattttacaaaactaatttaaagtagaagctgtcggccgggcacgatggctcacgcctgtaatcccagcactttgggaggccgagacaggcggatcacgaggtcaggagatcgagaccatcctggctaacacggtgaaaccccgtatctgctaaaaattcaaaaaaaaaagttagccgggcatgctcgtgagcgcctgtagtcccagctactcgggaggctgaggcaggagaatggcgtgaacccgggaggcggagcttgcagtgagccgagatcctgccactgcactccagcctgggcgacagagcgagactctggctcaaaaaaaaaaaaaaaaaaaaaaaagtcgaagctgtctattaaaaataaatgatagtaataatctaacgtggttcatgaggaaatttaaaaacaataaggcacctgtaattccagcactttaggaggccgtggagggtggatcacttgaggttaggcgctcaagaccagtctggccaacatggtgaagccccatctcaactaaaaatactaaaattagcaaggtgtggtgatgcacatctgtaatcccagctactcaggagactgaggcagaagaatcacttgaacctggatgtcagatattgcagtgagctgagctcataccactgcactccagcctgggcgacagagtgagtgagattccatctcaaaaacaaagaaacaaacaaacaaaacacacacaaaaaaaaaaccacacaaaaaaataaggctcttagcaaaataatagctaagtgtttttattttattttattttaaaattgtaccaaaaccatagatgaaactaagtgtttttttatatcttcattaagtgacaatcagtttgtttgttttggttttttttttttttaattatttagggatgggagtcttcccttgttgtccagactggtttcaaactcctggcctcaaatgatcctcacacctcagcctcccaaagtgctgagattacaggcgtgggccaccactcccaggcaccaatcacagttctaagaattttacatagatcaactttgttgagtcctcaccattctcatcccacagatgaggaaactgagtcgcagagaggctaaatgcattgttcagggtcacatagctggttgtgaaggtggtgtgtgaatggcaggtttggaaaggccaggtgtaggggctacattgtggaatgcccccggctcatgatgactacttaacttccctctcccctcctctttgcatgcagtgggcccccagcttctggcttgtactaaacactctgctctcccaactgttatggaatgaaacgggagcaagacttgatgcatactgggtaaatctaaccctgccctgaaaatttggaataattactgaagaagatgtcatctgcacagtagcactgaagtaaatccaattactcaggggagccctggacgccgtcattttcctcagatgcagtcaatctgcaggagagagaagaacgaatacatgcagagagaggcaaagtggagagatggggtcttcctgagccccagtgtttccacttcttagacctggtcctttctcatccacgtcaggctgcacccctcaacttgtcttttggtaactgcccccattcaacctaagctagctggggttggtttttgctttacttaataaaaacatttctttctttctttctttttttttttttttttgagaccgagtctcgctctgtcgcccagactggagtgcagtggcacgatctcggctcactgcaacctccgcctcctgggttcaggccattctcctgcctcagcctcccgagtagctgggactacaggcgcctgcaaccacgcacggctaattttttgtatttttagtagagacggggtttcaccatgttggtcaggatggtctcgatctcatgaccttgtgatctgcccgcctcggcctcccaaagtgctgggattacaggcgtgagccaccgcgcccacctaaaacatttcaaaataagatacgcaagctctatgtggaagcgaaagggggaagcagggaattcaagatctacaaaaggagttttaggaagtgaaatgggtattctcaagagtgggttggctgggtgcagtggctcatgcctgtaatctcagcactttgggaggccgaggcttgggaatcgcttgagcccaggagttcgagaccagcctgggcaacttagcaagaccttatctctacaaataataaaaaaaattagctgggcgtggtggtgcacgcctgtggtcccaactacttgggggggctgaggtgggaggattgcttgagcccaggaggttgaggctgcagtgagctgagatcgcaccactgcctttcagcctgggcgacagagcaagatcttgtcttagacaaaaaaaaaaaaaaggaggccgggtgcggtggcttacgcctgtaatcccagcactttgggaggcccaggcgggcggatcacttgaggtcgggagtttgagaccagcctgacaaacatggagaaacctgtctctactaaaaatacaaaaagttagccgggtgtggtggcaggcacctgtaatcccagctacttgggaggctgaggcaggagaatcgcttgaaaccaggaggcggaggttgcagtgagctgagatcgtgccattgcactccagcctgggtgacaagaccaaaactccgtctcaaaagaaagaaaaaagaaaagaaaagaaagaaaaaagaaagagagagagagagggaggaaaggaaaggaaaataaaggaaaagaggggagggaaggaaaggaaagggagaggagggagggaaggagggaaagaaggaagggagggaaagaaagaaaggaaagaaataggccgggcacggtggatcacacctgtagtcccagcactttgggaggccaaggcggcggatcacaaggtcaggagttcaagaccagcctggccagcatggtgaaacccccgtctctactaaaaatacaaaaaattagccgggcatggtggtgtgtgcctgtaatctcagctactcgggaggctgaggcaagagaattgcttgaacccaggaggcagaggttgcagtaagccgagatcagccactgcactccagccttagggatagagcgagactccatctcaaaaaaaaaaaaaaaagggaaagaagttaggaagttgatactatttcagactgtagagtctggttattttcccaggtcaggctggctgagcagagtgaacttgtctctccaggggtcccactttagcatcatttcacatgtactagggcttgcggcgtgggctatctagagccaaatagagatctagagccaaagagagtgcattttctgtcaaactcataagaaagaggaatggtcagcatctgaaagttccttttttttttttttttgagacggagtctcgctctgtggcccaggcttcagagcagtggcgagatctcagctcactgtaacctctacctcctgggttcaagcaattctcctgcctcagcctcctgagtagctgggattacaggcgcgtgccactacgcccggctaatctttgtatttttagtaacaacagggtttcaccatgttggtcagtttggtctggaactcctgaccttgtgatttgcctgccttagcctcccaaagggttggaattacaggcatgagccaccgcgcccggcaagagttcttatacctcaagcccaccatagttaagaactcaggctctggaatctaagatgtccaggttcaagtcccagccctgctaccccttgctaactgtcaccacttagacagttgatttaacctctttgagctctaacttcctcatctgtaaaatgaccaaatccatttctttttgttttctattttactaatttttacatttcggtgtattcatcccttctattctttcctatatttcattatgattctcctttttttgtttgttttgttttgttttgtgatggagtttcgctcttgttgtccaggctggagtgcaatggcacgatctcagctcactgcaacctctgcctcctgggttcaagcaattctcctgcctcagcctcccaagtagctgggattacaggcacccgccaccacgcccggctaattttttgtatttgtagtagagacggggtttcaccatgttggtcaggctggtttctttctttcctttttttctttctttcatcttttattctctgttagccaaggctggagtacagtggcacaatcatagcttactgcagcctcaaattcctgggctcaagagatcctctcacctcagcctgtcaagtatctagctcacgttttatttattcatttatttattttagagatggggtctcactatgttgccctggttggtctccaactcctggacttaaggggttctcctggctcactcttttcagttgctgaaattacaggtgtgagccaccgtgcccagggagcatttccacacataaaggaacaatctgggactgtcagttaacctcctgaactaatagggtgaccacgtggttccagttggtctgggactttcctggttttagcactaaaattctcatgttctgggaaaaccctcagttctgagcaaactggaatggttggccaccttaccaggttgtccttaatgcttggaaattccagaacattctgatgatagaatgatccagtgatgcccaaatgcagagtaagaaagaaggacatccacatacctgaagcaccaattgcaaatgaggatacctcatcctgcttcagactgacaaaaaatttactgggatgtggcccaagaatgtgtatttctcccaggggatttttatgtgtactcaagtttaggagaaccaaagttctcaaattgtagatggcagcccaagacagaggtcctgataacagccactgtagtcaggtgtaggagagaagagaggagaggaaaaaccctgggcgttggagctgagctggcacctgacttcccatttatttctgggtaataaatgacctcctgaaggctcagttttttaatgtattaaatggggataattaaaggctataatatgtgtaaagcccctgacatccagtaagtgtctgataaattttagttccccttccttagactttgatgcagaattgcaagaactggccataaaaagcaattctgcacatggaaaaactacttttcagaatatttcctcattaggacctcagtttcaaaacctcccaggaagtatcttttagacattaacatctgaaaaatacaataaagagttgctctgtttctttccagatggcttctctttatggcttggctgttgggaagttcaaagtcaaatactgaaaatctaatcatttaaaagccactcttttttttttttttttttgagacagagtcttgctctgtcacccaggctggagtgcagtggcgcaatctcggctcactgcaaccactgcctcccgagttcaagcaagtcttgtgcctcagtttcccaagtagttgggactacaggcgtgcaccaccatgcctggctaatttttgtatttttagtagagacagggttttgccatattggccaggttggtcttaaactcctaggctcaagcgatcctcctgcctcggcctcccaaagtgctgggaatacaggcacgagccactgtcctcagctgaagtgttttattgcatacatattattgatttctttctttctttcttttttgtgatggagtctcgctctgttgtccaggctggagtgcagtggcgcgatttctgctcactgcaagctctgcctcccgggttcacgccattctcctgcctcagcctcctgagtagctgagactacaggcgcccgccaccacacctggctaattttttgtacttttagtagagacggggtttcaccatgttagtcaggatggtctcgatctcctgagcttgtgatccacccgccttggcctcccaaagtgctgggattacaggcgtgagccaccacgcccagccctattattgatttctttcaacgttttattttgtaatcactatagtttcacaggaagttgtaaagactgcagagaagtctcatgtatcctccatctagtttcccccagtggttacatcttataaacggtagtacggtgccaacaccaggaaattggcagtcctacaatgagtgcgtgtagagttctatatcattttgtcacatgtgtagattcatgtaaccaccaccacaatcaagatacagagctgtgccattaccacagagatcttccccaacttatccacttctagttagccacactctctctcctcttcaccatcgcaacccctggcagccacttacctattctttgtctttataattttttgtcatttttgagaatgttatataaatggaagcctacagtgtatgaccttttgagattggctttttactttttatttgtttacttttaagacagggtctggctctgtcacccaggctggggtacagtggcatgctcttggctcaccgcaacctttgcttccagggctcaagcgatcctcccaccacctcagcctcccgagtagctaggaccacaggctcaagtcaccactaatttttttgtattttttgtagagacggggtcttgtcgtgttgcccatggctggtcttcaactcctgagctcaaagcgatccgcccacgtccgcctcccaaagtgttgggattataggcatgagccactgcgcccagccgggtggcttttttctcttcaatatgcccttgaggtccatccaaattgcggcatgcgtccacagttcattccttcccattgccaggagttttcctcatattatattataagcaataatatattattttcatttaaatcactctaaagtaagtaaaaaatggagctataaagacaatgttttactgaaaaagctactcatggctttatgctgctcaggtactgacttgtctgatccttaaaacaggcctgcggccgggcacagtggctcacgcctgtaacccagcactttggcaggccgaggtgggcggatcacctgctgtcaggagtttgagactagcctgcccaacatggcgaaaccccgtctctactaaaaatacaaaaaaattagccaggcgtggtggcatgaacctataatcccagctactcgggagggtgaagcaggagagtcgcttgaacccaggaggcggaggttgcagtgagccgagatcacaccactgcactccagcctggggacaagagcgaaactccgtctaaagaaaaaaaaaaaaaaaaaggccgggcgcggtggctcacgcctgtaacccagcactttggcaggccgaggcggacggaccaccacgaggtcaggagatcgaaaccatcctggctaacacggtgaaaccccgtctctactaaaataatacaaaaaaattagccgggcgtggtggcgggcgcctgtaagtcccagctactcaggaggccgaggcaggagaatggcgtgaacctgggaggcggagcttgcagtgagccgagatcgcgccactgcgctccagtctgggcgacacagcaagtctccgtctcaaacaaaacaaaacaaaacaaaacaaaaaaaccccagcaagtcttcgaatagaatagcagacattgcagaaccatggcgagtggaaacaagatgaaatatgtcaacctttagggtattacctgtgttcttaaataaaatagggcagattcagtgtttataaatagtgggggggtgagggggcgggtgtggtggctcatgcttgtatcccagcatttgggaggctgaggctggcggatcacttgatgctaggagtttgagaccagccaggcaacatggtgaaaccccatctctactaaaaatacaaatattagccaggcgtggtggcgcatgcctgtagccccagttactcgagaggctgaggcaggagaatcatttgaacccagaaaatggtggctgcagtgagctgaaatcgtaccactgcactctagtctgggcgacagagcaagactccatacatttttgtagtttcttatgtatttatttatttgagacggggtgttgctccgtcgcccagggtgcagtgcaatggtacagtcatggttcactgcagcctccgtctcccaagctcaagtgatctgcccgcctcaccctcctgagtaactgagaactcaggtgtacagcatcaaaccaggctattattattattattattattattattattattattattattgagccagagtctctctctgtcgaccaggctagagtgcagttgtgtgatcttggttcactgcaacctttgcctcccgggttcaagcaactctcctgccttagcctcccaagtagctgggattgcaggcacatgccaacacgcccggctaattttttgtatttttagtagaaacagggtttcatcatgttagccaggctggtctcgaactcctgacctcagatgatccgcctgcctcggcctcccaaagtgctgggattacaggcatgagtcactgcgcccggcccactaagcatgatcttaagccttaatgttgtagcac
